(19) United States
(12) Patent Application Publication
(10) Pub. No.: US 2008/0009041 A1
(43) Pub. Date: Jan. 10, 2008

(54) Industrially Useful Microorganism

(76) Inventors: Hiroshi Mizoguchi, Tokyo (JP); Kiyotaka Hara, Chiba (JP); Hideo Mori, Tokyo (JP)

Correspondence Address: FITZPATRICK CELLA HARPER & SCINTO, 30 ROCKEFELLER PLAZA, NEW YORK, NY, 10112, US

(21) Appl. No.: 11/720,020

(22) PCT Filed: Nov. 25, 2005
(86) PCT No.: PCT/JP05/21691

§ 371 Date: May 23, 2007

(30) Foreign Application Priority Data
Nov. 26, 2004 (JP) 2004-341706
Jul. 13, 2005 (JP) 2005-203965

(51) Int. Cl. C12P 1/04; C12N 1/20; C12P 19/00; C12P 21/00

(52) U.S. Cl. 435/71.1; 435/170; 435/252.8; 435/72

(57) ABSTRACT

According to the present invention, the E. coli mutant strain having chromosomal DNA that is at least 470 kbp shorter than that of a wild-type E. coli strain exhibits such a property that the number of the cells after a certain period of culture is greater than a wild-type strain. Thus, by culturing the mutant strain in a medium so as to generate and accumulate a useful substance in the culture, a useful substance such as proteins, peptides, amino acids, nucleic acids, vitamins, saccharides, organic acids, and lipids can be efficiently produced.

### TECHNICAL FIELD

[0001] The present invention relates to an E. coli mutant strain having chromosomal DNA shorter than that of a wild-type E. coli strain and a process for producing a useful substance using such mutant strain.

### BACKGROUND ART

[0002] All nucleotide sequences of the chromosomal DNAs of E. coli have been elucidated (Non-Patent Documents 1 and 2). Also, a method wherein a given gene or a given region on chromosomal DNA of E. coli is deleted as designed by homologous recombination has been known (Non-Patent Document 3). With the utilization of all of the nucleotide sequence information of chromosomal DNA and homologous recombination, a library of mutant E. coli in which genes of chromosomal DNA are comprehensively disrupted, a library of mutant E. coli in which approximately 20-kbp deletable regions of chromosomal DNAs are comprehensively deleted, and the like have been constructed (Non-Patent Documents 4 and 5).

[0003] As example of E. coli mutants that lack multiple regions on chromosomal DNA, a mutant that lacks a 376-kbp region (Non-Patent Document 6), a mutant that lacks a 262-kbp region (Non-Patent Document 7), and a mutant that lacks a 313-kbp region (Non-Patent Document 5) have been reported. However, the growth (the amount of cells or the growth rate) of such mutant strains is merely described as equivalent to that of their parental wild-type strains, and the influence of the introduction of deletions that are 400 kbp or longer into chromosomal DNA imposed upon the growth of E. coli is not described.

[0004] That is, an E. coli mutant, which lacks multiple regions on chromosomal DNA and the growth of which is improved over that of a wild-type E. coli strain, and a process for producing a useful substance using such mutant have not yet been known.
[0005] Non-Patent Document 1: Science, 277, 1453, 1997
[0006] Non-Patent Document 2: DNA Data Bank of Japan, “Escherichia coli K12 W3110,” online, Oct. 29, 2004, Internet <URL: http://gib.genes.nig.ac.jp/single/index.php?spid=Ecol_K12_W3110>
[0007] Non-Patent Document 3: J. Bacteriol., 180, 2063, 1998
[0008] Non-Patent Document 4: Tanpakushitsu, kakusan, kouso (Protein, nucleic acid, enzyme), vol. 46, p.2386, 2001
[0009] Non-Patent Document 5: Nature Biotechnol., 20, 1018, 2001
[0010] Non-Patent Document 6: Genome Research, 12, 640, 2002
[0011] Non-Patent Document 7: Genome Research, 13, 644, 2003

### DISCLOSURE OF THE INVENTION

[0012] object of the Invention

[0013] It is an object of the present invention to provide an E. coli mutant strain that lacks a plurality of regions on chromosomal DNA and a process for producing a useful substance using such mutant.

[0014] Means for Attaining the Object

[0015] The present invention relates to the following (1) to (47). (1) An E. coli mutant strain comprising the following genes [1] and [2] or homologous genes thereof and comprising chromosomal DNA that is at least 470 kbp shorter than that of a wild-type E. coli strain, provided that when the following genes [1] and [2] or homologous genes thereof comprise genes that wild-type E. coli strains do not originally contain (hereafter referred to as “NC genes”), the aforementioned E. coli mutant strain derived from the wild-type E. coli strain does not necessarily have the NC gene. [1] thrA gene, thrB gene, thrC gene, talB gene, mog gene, htgA gene, dnaK gene, dnaJ gene, hokC gene, nhaA gene, nhaR gene, rpsT gene, ribF gene, ileS gene, lspA gene, fkpB gene, lytB gene, dapB gene, carA gene, carB gene, caiF gene, caiE gene, caiD gene, caiC gene, caiB gene, caiA gene, caiT gene, fixA gene, fixB gene, fixC gene, fixX gene, kefC gene, folA gene, apaH gene, apaG gene, ksgA gene, pdxA gene, surA gene, imp gene, djlA gene, rluA gene, hepA gene, polB gene, araD gene, araA gene, araB gene, araC gene, tbpA gene, leuD gene, leuC gene, leuB gene, leuA gene, leuL gene, leuO gene, ilvI gene, ilvH gene, fruR gene, ftsL gene, ftsI gene, murE gene, murF gene, mraY gene, murD gene, ftsW gene, murG gene, murC gene, ddlB gene, ftsQ gene, ftsA gene, ftsZ gene, lpxC gene, secA gene, mutT gene, yacE gene, guaC gene, hofC gene, hofB gene, ppdD gene, nadC gene, ampD gene, ampE gene, aroP gene, pdhR gene, aceE gene, aceF gene, lpdA gene, acnB gene, speD gene, speE gene, gcd gene, hpt gene, yadF gene, panD gene, panC gene, panB gene, htrE gene, ecpD gene, folK gene, pcnB gene, dksA gene, sfsA gene, ligT gene, hrpB gene, ponB gene, hemL gene, pfs gene, dgt gene, htrA gene, dapD gene, glnD gene, map gene, rpsB gene, tsf gene, smb gene, rrf gene, dxr gene, rth gene, cdsA gene, yaeL gene, hlpA gene, lpxD gene, fabZ gene, lpxA gene, lpxB gene, rnhB gene, dnaE gene, accA gene, ldcC gene, mesJ gene, rof gene, cutF gene, proS gene, rcsF gene, abc gene, dniR gene, gloB gene, rnhA gene, dnaQ gene, up18 gene, gmhA gene, pepD gene, gpt gene, crl gene, phoE gene, proB gene, proA gene, hemB gene, proC gene, aroL gene, aroM gene, araJ gene, sbcC gene, sbcD gene, phoB gene, phoR gene, bmQ gene, proY gene, malZ gene, queA gene, tgt gene, secD gene, secF gene, tsx gene, ribD gene, ribH gene, nusB gene, thiL gene, pgpA gene, dxs gene, ispA gene, xseB gene, thiI gene, thiJ gene, apbA gene, cyoE gene, cyoD gene, cyoC gene, cyoB gene, cyoA gene, ampG gene, bolA gene, tig gene, clpP gene, clpX gene, lon gene, hupB gene, cof gene, mdlA gene, mdlB gene, glnK gene, amtB gene, tesB gene, maa gene, hha gene, acrB gene, acrA gene, acrR gene, aefA gene, priC gene, apt gene, dnaX gene, recR gene, htpG gene, adk gene, hemH gene, aes gene, gsk gene, fsr gene, ushA gene, cueR gene, gcl gene, gip gene, purK gene, purE gene, ybbF gene, ppiB gene, cysS gene, folD gene, sfiA gene, sfmC gene, sfmD gene, sfmH gene, sfmF gene, fimZ gene, entD gene, fepA gene, fes gene, entF gene, fepE gene, fepC gene, fepG gene, fepD gene, fepB gene, entC gene, entE gene, entB gene, entA gene, cstA gene, dsbG gene, ahpC gene, ahpF gene, rnk gene, rna gene, citT gene, citG gene, citX gene, citF gene, citE gene, citD gene, citC gene, citA gene, citB gene, dcuC gene, dcuC gene, crcA gene, cspE gene, crcB gene, lipA gene, lipB gene, dacA gene, rlpA gene, mrdB gene, mrdA gene, phpB gene, nadD gene, holA gene, rlpB gene, leuS gene, lnt gene, phoL gene, ubiF gene, asnB gene, nagD gene, nagC gene, nagA gene, nagB gene, nagE gene, glnS gene, fur gene, fldA gene, seqA gene, pgm gene, potE gene, speF gene, kdpE gene, kdpD gene, kdpC gene, kdpB gene, kdpA gene, phrB gene, end8 gene, abrB gene, gltA gene, sdhC gene, sdhD gene, sdhA gene, sdhB gene, sucA gene, sucB gene, sucC gene, sucD gene, farR gene, hrsA gene, cydA gene, cydB gene, tolQ gene, tolR gene, tolA gene, tolB gene, pal gene, nadA gene, pnuC gene, czcD gene, aroG gene, gpmA gene, galM gene, galK gene, galT gene, galE gene, modF gene, modE gene, modA gene, modB gene, modC gene, bioA gene, bioB gene, bioF gene, bioC gene, bioD gene, uvrB gene, moaA gene, moaB gene, moaC gene, moaD gene, moaE gene, rhlE gene, dps gene, ompX gene, mipB gene, moeB gene, moeA gene, mdfA gene, grxA gene, poxB gene, aqpZ gene, cspD gene, cipA gene, infA gene, aat gene, cydC gene, cydD gene, trxB gene, lrp gene, ftsK gene, lolA gene, serS gene, dmsA gene, dmsB gene, dmsC gene, pflA gene, pflB gene, focA gene, serC gene, aroA gene, cmk gene, rpsA gene, himD gene, msbA gene, lpxK gene, kdsB gene, smtA gene, mukF gene, kicA gene, mukB gene, aspC gene, ompF gene, asnS gene, pncB gene, pepN gene, ssuB gene, ssuC gene, ssuD gene, ssuA gene, ssuE gene, pyrD gene, uup gene, pqiA gene, pqiB gene, rmf gene, fabA gene, ompA gene, sulA gene, helD gene, mgsA gene, acyP gene, hyaA gene, hyaB gene, hyaC gene, hyaD gene, hyaE gene, hyaF gene, appC gene, appB gene, appA gene, csgG gene, csgF gene, csgE gene, csgD gene, csgB gene, csgA gene, csgC gene, sfaA gene, mdoG gene, mdoH gene, msyB gene, htrB gene, solA gene, dinI gene, pyrC gene, grxB gene, rimJ gene, mviM gene, mviN gene, flgN gene, flgM gene, flgA gene, flgB gene, flgC gene, flgD gene, flgE gene, flgF gene, flgG gene, flgH gene, flgI gene, flgJ gene, flgK gene, flgL gene, rne gene, rluC gene, rpmF gene, plsX gene, fabH gene, fabD gene, fabG gene, acpP gene, fabF gene, pabC gene, tmk gene, holB gene, ptsG gene, fhuE gene, nagZ gene, ndh gene, mfd gene, ycfU gene, ycfV gene, ycfW gene, cobB gene, potD gene, potC gene, potB gene, potA gene, pepT gene, phoQ gene, phoP gene, purB gene, trmU gene, icdA gene, minE gene, minD gene, minC gene, clyA gene, umuD gene, umuC gene, dsbB gene, nhaB gene, fadR gene, dadA gene, dadX gene, ldcA gene, mltE gene, tag1 gene, treA gene, dhaR gene, pth gene, prsA gene, ychB gene, hemM gene, hemA gene, prfA gene, hemK gene, kdsA gene, chaA gene, chaB gene, chaC gene, narL gene, narX gene, narK gene, narG gene, narH gene, narJ gene, narI gene, tpr gene, purU gene, sprE gene, galU gene, hns gene, tdk gene, adhE gene, oppA gene, oppB gene, oppC gene, oppD gene, oppF gene, cls gene, kch gene, tonB gene, trpA gene, trpB gene, trpC gene, trpD gene, trpE gene, trpL gene, btuR gene, sohB gene, topA gene, cysB gene, acnA gene, ribA gene, pgpB gene, pyrF gene, osmB gene, rnb gene, envM gene, sapF gene, sapD gene, sapC gene, sapB gene, sapA gene, aldH gene, ordL gene, goaG gene, pspF gene, pspA gene, pspB gene, pspC gene, pspD gene, pspE gene, sucP gene, ompG gene, tyrR gene, tpx gene, mppA gene, fnr gene, ogt gene, dbpA gene, intR gene, lar gene, recT gene, recE gene, racC gene, kil gene, sieB gene, racR gene, dnaC gene, enpP gene, trkG gene, VMTH_LAMBD gene, VLOM_LAMBD gene, tnpO gene, upo3 gene, ompN gene, nifJ gene, hslJ gene, ldhA gene, feaR gene, feaB gene, tynA gene, paaZ gene, paaA gene, paaB gene, paaC gene, paaD gene, paaE gene, paaF gene, paaG gene, paaH gene, paaI gene, paaJ gene, paaK gene, paaX gene, paaY gene, acpD gene, hrpA gene, aldA gene, gapC gene, gapC gene, cybB gene, trg gene, rimL gene, tehA gene, tehB gene, prtC gene, potA gene, potC gene, ansP gene, nhoA gene, narV gene, narW gene, narY gene, narZ gene, narU gene, fdnG gene, fdnH gene, fdnI gene, adhP gene, sfcA gene, rpsV gene, osmC gene, dos gene, xasA gene, gadB gene, pqqL gene, chuR gene, hipA gene, hipB gene, tam gene, uxaB gene, marC gene, marR gene, marA gene, marB gene, dcp gene, lycV gene, dicA gene, dicB gene, rspB gene, rspA gene, speG gene, dmsB gene, dmsC gene, bioD gene, mlc gene, asr gene, ebr gene, pntB gene, pntA gene, arcD gene, rstA gene, rstB gene, tus gene, fumC gene, fumA gene, manA gene, uidC gene, uidB gene, uidA gene, uidR gene, hdhA gene, mall gene, malX gene, malY gene, add gene, blr gene, nth gene, gst gene, pdxY gene, tyrS gene, pdxH gene, slyB gene, slyA gene, sodC gene, nemA gene, gloA gene, rnt gene, lhr gene, sodB gene, araJ gene, purR gene, cfa gene, ribE gene, ag43 gene, phsC gene, nrfC gene, pykF gene, lpp gene, sufs gene, aroD gene, ppsA gene, aroH gene, nlpC gene, btuD gene, btuE gene, btuC gene, himA gene, pheT gene, pheS gene, pheM gene, rplT gene, rpml gene, infC gene, thrs gene, arp gene, pfkB gene, cedA gene, katE gene, celF gene, celD gene, ceiC gene, celB gene, celA gene, osmE gene, nadE gene, spy gene, astE gene, astB gene, astD gene, astA gene, cstC gene, xthA gene, gdhA gene, topB gene, selD gene, sppA gene, ansA gene, tdh gene, gapA gene, ttuC gene, caiT gene, rnd gene, fadD gene, slp gene, pabB gene, sdaA gene, manX gene, manY gene, manZ gene, rrmA gene, cspC gene, kdgR gene, tcmA gene, htpX gene, prc gene, pqiB gene, pphA gene, holE gene, exoX gene, ptrB gene, purT gene, eda gene, edd gene, zwf gene, pykA gene, mlt gene, znuA gene, znuC gene, ruvB gene, ruvA gene, ruvC gene, ntpA gene, aspS gene, bisZ gene, torY gene, cutC gene, argS gene, pgsA gene, a=m gene, cbl gene, nac gene, erfK gene, cobT gene, cobS gene, cobU gene, gyrI gene, phsE gene, sbcB gene, hisL gene, hisG gene, hisD gene, hisC gene, hisB gene, hisH gene, hisA gene, hisF gene, hisI gene, wzz gene, ugd gene, gnd gene, galF gene, wcaM gene, wcaL gene, wcaK gene, wzxC gene, wcaJ gene, cpsG gene, cpsB gene, wcaI gene, wcaH gene, wcaG gene, gmd gene, wcaF gene, wcaE gene, wcaD gene, wcaC gene, wcaB gene, wcaA gene, wzb gene, wza gene, asmA gene, dcd gene, udk gene, thiD gene, thiM gene, mrp gene, metG gene, cdd gene, sanA gene, mglC gene, mglA gene, mglB gene, galS gene, folE gene, cirA gene, lysP gene, nfo gene, fruA gene, fruK gene, fruB gene, rplY gene, narP gene, ccmH gene, dsbE gene, ccmF gene, ccmE gene, ccmD gene, ccmC gene, ccmB gene, ccmA gene, napC gene, napB gene, napH gene, napG gene, napA gene, napD gene, napF gene, eco gene, alkB gene, ada gene, apbE gene, rcsB gene, rcsC gene, atoS gene, atoC gene, atoD gene, atoA gene, atoE gene, atoB gene, gyrA gene, ubiG gene, nrdA gene, nrdB gene, inaA gene, glpQ gene, glpT gene, glpA gene, glpB gene, glpC gene, cinA gene, ais gene, pmrD gene, menE gene, menC gene, menB gene, menD gene, menF gene, nuoN gene, nuoM gene, nuoL gene, nuoK gene, nuoJ gene, nuoI gene, nuoH gene, nuoG gene, nuoF gene, nuoE gene, nuoD gene, nuoB gene, nuoA gene, lrhA gene, ackA gene, pta gene, ubiX gene, purF gene, dedE gene, dedD gene, foIC gene, accD gene, dedA gene, truA gene, usgI gene, pdxB gene, div gene, fabB gene, ddpX gene, mepA gene, aroC gene, sixA gene, fadL gene, vacJ gene, dsdC gene, dsdX gene, dsdA gene, emrY gene, emrK gene, evgA gene, evgS gene, bifF gene, ddg gene, glk gene, mntH gene, nupC gene, gltX gene, xapR gene, xapB gene, xapA gene, lig gene, zipA gene, cysZ gene, cysK gene, ptsH gene, ptsI gene, gsr gene, pdxK gene, cysM gene, cysA gene, cysW gene, cysU gene, cysP gene, ucpA gene, ptbA gene, amiA gene, hemF gene, cchA gene, eutC gene, eutB gene, eutH gene, eutG gene, eutJ gene, eutE gene, cchB gene, eutI gene, talA gene, tktB gene, aegA gene, narQ gene, acrD gene, dapE gene, purC gene, nlpB gene, dapA gene, gcvR gene, bcp gene, hyfA gene, hyfB gene, hyfC gene, hyfD gene, hyfE gene, hyfF gene, hyfG gene, hyfH gene, hyfI gene, hyfJ gene, hyfR gene, focB gene, perM gene, yfgE gene, uraA gene, upp gene, purM gene, purN gene, ppk gene, ppx gene, guaA gene, guaB gene, xseA gene, hisS gene, gcpE gene, ndk gene, pbpC gene, sseA gene, sseB gene, pepB gene, fdx gene, hscA gene, hscB gene, iscU gene, iscS gene, iscR gene, suhB gene, csiE gene, dgxA gene, dgxB gene, hcaC gene, hcaB gene, hcaD gene, glyA gene, hmpA gene, glnB gene, purL gene, acpS gene, pdxJ gene, recO gene, era gene, me gene, lepB gene, lepA gene, rseC gene, rseB gene, rseA gene, rpoE gene, nadB gene, srnB gene, ung gene, trx2 gene, pssA gene, kgtP gene, clpB gene, rluD gene, pheL gene, pheA gene, tyrA gene, aroF gene, rplS gene, trmD gene, rimM gene, rpsp gene, ffh gene, grpE gene, recN gene, smpA gene, smpB gene, gabD gene, gabT gene, gabP gene, nrdF gene, emrR gene, emrA gene, emrB gene, gshA gene, csrA gene, alaS gene, oraA gene, recA gene, mltB gene, hypF gene, hydN gene, ascG gene, ascF gene, ascB gene, hycI gene, hycH gene, hycG gene, hycF gene, hycE gene, hycD gene, hycC gene, hycB gene, hycA gene, hypA gene, hypB gene, hypC gene, hypD gene, hypE gene, fhlA gene, mutS gene, prpB gene, rpoS gene, pcm gene, surE gene, ygbB gene, ygbP gene, ygbQ gene, cysC gene, cysN gene, cysD gene, iap gene, cysH gene, cysI gene, cysJ gene, ptpS gene, eno gene, pyrG gene, mazG gene, chpR gene, relA gene, barA gene, gud2 gene, gudT gene, mioC gene, syd gene, sdaB gene, exo gene, fucO gene, fucA gene, fucP gene, fueI gene, fucK gene, fucU gene, fucR gene, gcvA gene, nifS gene, mitA gene, amiC gene, argA gene, thyA gene, lgt gene, ptsP gene, mutH gene, tas gene, aas gene, galR gene, lysA gene, lysR gene, araE gene, kduD gene, kduI gene, lysS gene, prfB gene, recJ gene, dsbC gene, xerD gene, fldB gene, upl4 gene, bglA gene, gcvP gene, gevH gene, gcvT gene, visC gene, ubiH gene, pepP gene, serA gene, rpiA gene, iciA gene, sbm gene, argK gene, fba gene, pgk gene, epd gene, tktA gene, speB gene, speA gene, metK gene, galP gene, sprT gene, endA gene, gshB gene, yqgF gene, ansB gene, mutY gene, mltC gene, nupG gene, speC gene, pitB gene, gsp gene, hybG gene, hybF gene, hybE gene, hybD gene, hybC gene, hybB gene, hybA gene, hoxK gene, exbD gene, exbB gene, metC gene, exsA gene, sufI gene, plsC gene, parC gene, parE gene, icc gene, tolC gene, ribB gene, glgS gene, rfaE gene, glnE gene, cca gene, bacA gene, folB gene, ttdA gene, ttdB gene, ygjD gene, rpsU gene, dnaG gene, rpoD gene, aer gene, ebgR gene, ebgA gene, ebgC gene, fadH gene, uxaA gene, uxaC gene, exuT gene, exuR gene, tdcE gene, tdcD gene, tdcC gene, tdcB gene, tdcA gene, tdcR gene, sohA gene, agaR gene, agaZ gene, agaV gene, agaW gene, agaA gene, agaS gene, agaY gene, agaB gene, agac gene, agaD gene, agaI gene, mtr gene, deaD gene, nlpI gene, pnp gene, rpsO gene, truB gene, rbfA gene, infB gene, nusA gene, argG gene, secG gene, mrsA gene, folP gene, ftsH gene, ftsJ gene, greA gene, dacB gene, yhbZ gene, rpmA gene, rplU gene, ispB gene, nlp gene, murA gene, yrbI gene, yrbK gene, rpoN gene, ptsN gene, ptsO gene, mtgA gene, arcB gene, gltB gene, nanT gene, npl gene, nanR gene, dcuD gene, sspB gene, sspA gene, rpsI gene, rplM gene, hhoA gene, hhoB gene, md& gene, argR gene, tldD gene, rmg gene, mreD gene, mreC gene, mreB gene, accB gene, accC gene, panF gene, prmA gene, fis gene, aroE gene, smg gene, smf gene, def gene, fmt gene, sun gene, trkA gene, mscL gene, zntR gene, rplQ gene, rpoA gene, rpsD gene, rpsK gene, rpsM gene, rpmJ gene, secY gene, rplO gene, rpmD gene, rpsE gene, rpIR gene, rplF gene, rpsH gene, rpsN gene, rplE gene, rplX gene, rplN gene, rpsQ gene, rpmC gene, rplP gene, rpsC gene, rpIV gene, rpsS gene, rplB gene, rplW gene, rplD gene, rplC gene, rpsJ gene, tufA gene, fusA gene, rpsG gene, rpsL gene, fkpA gene, slyX gene, slyD gene, kefB gene, prkB gene, crp gene, argD gene, pabA gene, fic gene, ppiA gene, nirB gene, nirD gene, nirC gene, cysG gene, php gene, trpS gene, gph gene, rpe gene, dam gene, damX gene, aroB gene, aroK gene, hofQ gene, mrcA gene, pckA gene, envZ gene, ompR gene, greB gene, feoA gene, feoB gene, bioH gene, gntT gene, malQ gene, malP gene, malT gene, rtcA gene, rtcB gene, rtcR gene, glpR gene, gipG gene, gIpE gene, glpD gene, glgP gene, glgA gene, glgC gene, glgX gene, glgB gene, asd gene, gntU gene, gntU gene, gntK gene, gntR gene, ggt gene, ugpQ gene, ugpC gene, ugpE gene, ugpA gene, ugpB gene, livF gene, livG gene, livM gene, livH gene, livK gene, livJ gene, rpoH gene, ftsX gene, ftsE gene, ftsY gene, atzN gene, nikA gene, nikB gene, nikC gene, nikD gene, nikE gene, pitA gene, uspB gene, uspA gene, prlC gene, gor gene, arsR gene, arsB gene, arsC gene, slp gene, hdeB gene, hdeA gene, hdeD gene, gadA gene, treF gene, kdgK gene, dctA gene, dppF gene, dppD gene, dppC gene, dppB gene, dppA gene, tag gene, bisC gene, cspA gene, glyS gene, glyQ gene, xylB gene, xylA gene, xylF gene, xylG gene, xylH gene, xylR gene, bax gene, malS gene, avtA gene, lyx gene, sgbH gene, sgbU gene, sgbE gene, aldB gene, selB gene, selA gene, mtlA gene, mtlD gene, mtlR gene, lldP gene, lldR gene, lldD gene, cysE gene, gpsA gene, secB gene, grxC gene, tdh gene, kbl gene, htrL gene, rfaD gene, rfaF gene, rfaC gene, rfaL gene, rfaK gene, rfaZ gene, rfaY gene, rfaJ gene, rfaI gene, rfaB gene, rfaS gene, rfaP gene, rfaG gene, rfaQ gene, kdtA gene, kdtB gene, mutM gene, rpmG gene, rpmB gene, radC gene, dfp gene, dut gene, ttk gene, pyrE gene, rph gene, dinD gene, gmk gene, rpoZ gene, spoT gene, spoU gene, recG gene, gltS gene, nlpA gene, uhpT gene, uhpC gene, uhpB gene, uhpA gene, ilvN gene, ilvB gene, ivbL gene, emrD gene, ibpB gene, ibpA gene, gyrB gene, recF gene, dnaN gene, dnaA gene, rpmH gene, rnpA gene, yidC gene, thdF gene, tnaL gene, tnaA gene, tnaB gene, bglB gene, bglF gene, bglG gene, phoU gene, pstB gene, pstA gene, pstC gene, pstS gene, glmS gene, glmU gene, atpC gene, uncD gene, atpG gene, atpA gene, atpH gene, atpF gene, atpE gene, atpB gene, atpI gene, gidB gene, gidA gene, mioC gene, asnC gene, pssR gene, ilvL gene, ilvG gene, ilvM gene, ilvE gene, ilvD gene, ilvA gene, ilvY gene, ilvC gene, ppiC gene, rep gene, gppA gene, rhIB gene, trxA gene, rhoL gene, rho gene, rfe gene, wzzE gene, nfrC gene, rffD gene, rffG gene, rffH gene, rffA gene, wzxE gene, rffT gene, wecG gene, aslB gene, aslA gene, hemY gene, hemX gene, hemD gene, hemC gene, cyaA gene, cyaY gene, dapF gene, xerC gene, uvrD gene, corA gene, radD gene, pldA gene, recQ gene, pldB gene, metR gene, metE gene, udp gene, ubiE gene, aarF gene, tatC gene, tatD gene, rfaH gene, ubiD gene, ubiB gene, fadA gene, fadB gene, pepQ gene, trkH gene, trkH gene, hemG gene, mobB gene, mobA gene, dsbA gene, polA gene, yihA gene, hemN gene, ntrC gene, ntrB gene, glnA gene, fdhE gene, fdoI gene, fdoH gene, fdoG gene, fdhD gene, sodA gene, kdgT gene, cpxA gene, cpxR gene, cpxP gene, pfkA gene, sbp gene, cdh gene, tpiA gene, fpr gene, glpX gene, glpK gene, glpF gene, menG gene, menA gene, hslU gene, hsiV gene, ftsN gene, cytR gene, priA gene, rpmE gene, metJ gene, metB gene, metL gene, metF gene, katG gene, gldA gene, talC gene, ppc gene, argE gene, argC gene, argB gene, argH gene, oxyR gene, udhA gene, trnA gene, btuB gene, murI gene, murB gene, birA gene, coaA gene, tufB gene, secE gene, nusG gene, rplK gene, rplA gene, rplJ gene, rplL gene, rpoB gene, rpoC gene, htrC gene, thiH gene, thiG gene, thiS gene, thiF gene, thiE gene, thiC gene, rsd gene, hemE gene, nfi gene, hupA gene, hydH gene, hydG gene, purD gene, purH gene, metA gene, aceB gene, aceA gene, aceK gene, arp gene, iclR gene, metH gene, pepE gene, lysC gene, pgi gene, ubiC gene, ubiA gene, plsB gene, dgkA gene, lexA gene, dinF gene, qor gene, dnaB gene, alr gene, tyrB gene, napA gene, hobH gene, uvrA gene, ssb gene, soxS gene, soxR gene, acs gene, nrfA gene, nrfB gene, nrfC gene, nrfD gene, nrfe gene, nrfF gene, nrfG gene, gltP gene, fdhF gene, alsR gene, rpiB gene, proP gene, basS gene, basR gene, adiY gene, adi gene, meiR gene, melA gene, melB gene, fumB gene, dcuB gene, dcuR gene, dcuS gene, lysU gene, cadA gene, cadB gene, cadC gene, cutA3 gene, cutA2 gene, cutA gene, dcuA gene, aspA gene, fxsA gene, groES gene, groEL gene, efp gene, ecnB gene, sugE gene, blc gene, ampC gene, frdD gene, frdC gene, frdB gene, frdA gene, genX gene, psd gene, yjeQ gene, yjeE gene, amiB gene, mutL gene, miaA gene, hfq gene, hflX gene, hflK gene, hflC gene, purA gene, vacB gene, sgaE gene, rpsF gene, priB gene, rpsR gene, rplI gene, fklB gene, cycA gene, cpdB gene, cysQ gene, msrA gene, chpS gene, chpB gene, ppa gene, fbp gene, mpl gene, pmbA gene, cybC gene, nrdG gene, nrdD gene, treC gene, treB gene, treR gene, mgtA gene, pyrI gene, pyrB gene, pyrBI gene, argI gene, valS gene, holC gene, xerB gene, idnR gene, idnT gene, idnO gene, idnD gene, idnK gene, fecE gene, fecD gene, fecC gene, fecB gene, fecA gene, fecR gene, feel gene, dnaC gene, dnaT gene, bglJ gene, fhuF gene, rsmC gene, holD gene, rimI gene, prfC gene, osmY gene, deoC gene, deoA gene, deoB gene, deoD gene, IplA gene, smp gene, serB gene, radA gene, nadR gene, slt gene, trpR gene, gpmG gene, rob gene, creA gene, creB gene, creC gene, creD gene, arcA gene, lasT gene, thrL gene;

[0016] [2] acrE gene, argT gene, artI gene, artJ gene, artM gene, artP gene, artQ gene, bfr gene, chiA gene, chpA gene, dacC gene, deoR gene, dinG gene, elaA gene, elaB gene, elaC gene, elaD gene, envD gene, envR gene, fhuA gene, fhuB gene, fhuC gene, fhuD gene, foIX gene, glnH gene, glnP gene, glnQ gene, gltJ gene, gltK gene, gltL gene, gspA gene, gspc gene, gspD gene, gspE gene, gspI gene, gspJ gene, gspK gene, gspL gene, hisJ gene, hisM gene, hisP gene, hisQ gene, hofD gene, hofF gene, hofG gene, hofH gene, ltaA gene, mdaA gene, mdaB gene, pinO gene, potF gene, potG gene, potH gene, potI gene, pshM gene, ptwB gene, ptwC gene, rhsB gene, rimK gene, xylU gene.

[0017] (2) The E. coli mutant strain according to above (1) comprising chromosomal DNA that comprises DNA having the nucleotide sequences as shown in [1] to [69] below of the nucleotide sequence as shown in SEQ ID NO: 1 or DNA equivalent thereto.
[0018] [1] a nucleotide sequence of nucleotides 1 to 167064
[0019] [2] a nucleotide sequence of nucleotides 172980 to 243964
[0020] [3] a nucleotide sequence of nucleotides 253411 to 261963
[0021] [4] a nucleotide sequence of nucleotides 387532 to 389138
[0022] [5] a nucleotide sequence of nucleotides 403704 to 518029
[0023] [6] a nucleotide sequence of nucleotides 532712 to 535504
[0024] [7] a nucleotide sequence of nucleotides 550216 to 563940
[0025] [8] a nucleotide sequence of nucleotides 608119 to 675103
[0026] [9] a nucleotide sequence of nucleotides 689375 to 728820
[0027] [10] a nucleotide sequence of nucleotides 739594 to 832551
[0028] [11] a nucleotide sequence of nucleotides 848090 to 867637
[0029] [12] a nucleotide sequence of nucleotides 883474 to 890997
[0030] [13] a nucleotide sequence of nucleotides 909380 to 1048887
[0031] [14] a nucleotide sequence of nucleotides 1097020 to 1198105
[0032] [15] a nucleotide sequence of nucleotides 1225147 to 1630911
[0033] [16] a nucleotide sequence of nucleotides 1641039 to 1642631
[0034] [17] a nucleotide sequence of nucleotides 1650223 to 1964523
[0035] [18] a nucleotide sequence of nucleotides 1993076 to 1996661
[0036] [19] a nucleotide sequence of nucleotides 2028210 to 2033448
[0037] [20] a nucleotide sequence of nucleotides 2044377 to 2069148
[0038] [21] a nucleotide sequence of nucleotides 2081927 to 2104392
[0039] [22] a nucleotide sequence of nucleotides 2116065 to 2146263
[0040] [23] a nucleotide sequence of nucleotides 2187856 to 2200668
[0041] [24] a nucleotide sequence of nucleotides 2229851 to 2255894
[0042] [25] a nucleotide sequence of nucleotides 2263492 to 2270439
[0043] [26] a nucleotide sequence of nucleotides 2286589 to 2386261
[0044] [27] a nucleotide sequence of nucleotides 2395472 to 2423364
[0045] [28] a nucleotide sequence of nucleotides 2434099 to 2472851
[0046] [29] a nucleotide sequence of nucleotides 2482483 to 2505074
[0047] [30] a nucleotide sequence of nucleotides 2514558 to 2755676
[0048] [31] a nucleotide sequence of nucleotides 2789481 to 2795173
[0049] [32] a nucleotide sequence of nucleotides 2800891 to 2804307
[0050] [33] a nucleotide sequence of nucleotides 2810148 to 2825313
[0051] [34] a nucleotide sequence of nucleotides 2830263 to 2910273
[0052] [35] a nucleotide sequence of nucleotides 2910574 to 2985361
[0053] [36] a nucleotide sequence of nucleotides 3033129 to 3077084
[0054] [37] a nucleotide sequence of nucleotides 3078917 to 3110109
[0055] [38] a nucleotide sequence of nucleotides 3134342 to 3165627
[0056] [39] a nucleotide sequence of nucleotides 3172941 to 3360736
[0057] [40] a nucleotide sequence of nucleotides 3370548 to 3411159
[0058] [41] a nucleotide sequence of nucleotides 3420879 to 3453020
[0059] [42] a nucleotide sequence of nucleotides 3469367 to 3618575
[0060] [43] a nucleotide sequence of nucleotides 3636917 to 3854661
[0061] [44] a nucleotide sequence of nucleotides 3865832 to 3867101
[0062] [45] a nucleotide sequence of nucleotides 3877011 to 3926658
[0063] [46] a nucleotide sequence of nucleotides 3938879 to 4059897
[0064] [47] a nucleotide sequence of nucleotides 4079660 to 4086450
[0065] [48] a nucleotide sequence of nucleotides 4099983 to 4139231
[0066] [49] a nucleotide sequence of nucleotides 4149710 to 4235358
[0067] [50] a nucleotide sequence of nucleotides 4251736 to 4298976
[0068] [51] a nucleotide sequence of nucleotides 4311512 to 4313317
[0069] [52] a nucleotide sequence of nucleotides 4329722 to 4409532
[0070] [53] a nucleotide sequence of nucleotides 4423152 to 4496201
[0071] [54] a nucleotide sequence of nucleotides 4509535 to 4517875
[0072] [55] a nucleotide sequence of nucleotides 4599638 to 4641433
[0073] [56] a nucleotide sequence of nucleotides 167065 to 172979
[0074] [57] a nucleotide sequence of nucleotides 675104 to 689374
[0075] [58] a nucleotide sequence of nucleotides 832552 to 848089
[0076] [59] a nucleotide sequence of nucleotides 867638 to 883473
[0077] [60] a nucleotide sequence of nucleotides 890998 to 909379
[0078] [61] a nucleotide sequence of nucleotides 2386262 to 2395471
[0079] [62] a nucleotide sequence of nucleotides 2423365 to 2434098
[0080] [63] a nucleotide sequence of nucleotides 2472852 to 2482482
[0081] [64] a nucleotide sequence of nucleotides 2505075 to 2514557
[0082] [65] a nucleotide sequence of nucleotides 2910274 to 2910573
[0083] [66] a nucleotide sequence of nucleotides 3165628 to 3172940
[0084] [67] a nucleotide sequence of nucleotides 3411160 to 3420878
[0085] [68] a nucleotide sequence of nucleotides 3453021 to 3469366
[0086] [69] a nucleotide sequence of nucleotides 3618576 to 3636916

[0087] (3) The E. coli mutant strain according to (1) or (2) comprising chromosomal DNA that does not comprise yafJ gene, yafK gene, yafQ gene, dinJ gene, yafL gene, yafM gene, fhiA gene, lafU gene, dinP gene, yafN gene, yafO gene, yafP gene, JW0225 gene, prfH gene, ykfI gene, yafW gene, yeeT gene, ykfG gene, yafX gene, ykfF gene, ykfB gene, yafY gene, ypjK gene, yafZ gene, ykfA gene, perR gene, JW0245 gene, JW0246 gene, JW0247 gene, ykfC gene, JW0249 gene, is5B gene, yi51 gene, mmuP gene, mmuM gene, afuC gene, JW0255 gene, insB gene, insA gene, JW0258 gene, yagB gene, yagA gene, yagE gene, yagF gene, yagG gene, yagH gene, yagI gene, argF gene, yfjI gene, yagJ gene, yagK gene, yagL gene, yagM gene, yagN gene, intF gene, yagP gene, yagQ gene, yagR gene, yagS gene, yagT gene, yagU gene, ykgJ gene, yagV gene, yagW gene, yagX gene, yagY gene, yagZ gene, ykgK gene, ykgL gene, ykgM gene, eaeH gene, JW0292 gene, JW0293 gene, ykgA gene, ykgB gene, ykgI gene, merA gene, ykgD gene, ykgE gene, ykgF gene, ykgG gene, ykgH gene, betA gene, betB gene, betI gene, betT gene, yahA gene, yahB gene, yahC gene, yahD gene, yahE gene, yahF gene, yahG gene, yahH gene, arcM gene, yahJ gene, yahK gene, yahL gene, yahM gene, yahN gene, yahO gene, prpR gene, bcpA gene, prpC gene, prpD gene, prpE gene, codB gene, codA gene, cynR gene, cynT gene, cynS gene, cynX gene, lacA gene, lacY gene, lacZ gene, lacI gene, mhpR gene, mhpA gene, mhpB gene, mhpC gene, mhpD gene, mhpF gene, mhpE gene, mhpT gene, yaiL gene, yaiM gene, adhC gene, yaiN gene, yaiO gene, JW0350 gene, yi2A gene, yi22 gene, yi24 gene, yi23 gene, yaiP gene, yaiS gene, tauA gene, tauB gene, tauC gene, ssiD gene, yaiT gene, JW0363 gene, JW0364 gene, yaiU gene, yaiV gene, ampH gene, sbmA gene, yaiW gene, yaiY gene, yaiZ gene, ddlA gene, yaiB gene, phoA gene, psiF gene, yaiC gene, ybbO gene, tesA gene, ybbA gene, ybbP gene, rhsD gene, ybbC gene, rhsE gene, ybbD gene, JW0490 gene, ybbB gene, ybbS gene, ybbT gene, ybbU gene, ybbQ gene, ybbV gene, allP gene, allA gene, ybbY gene, ybbZ gene, ylbA gene, allC gene, ylbC gene, fdrA gene, ylbE gene, ylbF gene, arcC gene, intD gene, EXO_LAMBD gene, VRPP_LAMBD gene, JW0528 gene, JW0529 gene, VREN_LAMBD gene, emrE gene, ybcK gene, ybcL gene, ybcM gene, ybcN gene, ninE gene, ybcO gene, rus gene, ybcQ gene, JW0539.5 gene, nmpC gene, vlyS gene, ybcS gene, ybcT gene, vboR gene, ybcV gene, ybcW gene, nohB gene, ybcX gene, ybcY gene, JW0552 gene, appY gene, ompT gene, envY gene, ybcH gene, nfrA gene, nfrB gene, cusS gene, cusR gene, cusC gene, ylcC gene, cusB gene, cusA gene, pheP gene, ybdG gene, nfnB gene, ybdF gene, ybdJ gene, ybdK gene, hokE gene, yi81 gene, yi82 gene, ymcC gene, ymcD gene, cspH gene, cspG gene, sfa gene, yccL gene, yccM gene, torS gene, torT gene, torR gene, torC gene, torA gene, torD gene, yccD gene, cbpA gene, yccE gene, agp gene, yccJ gene, wrbA gene, yciG gene, ycdG gene, JW0992 gene, JW0993 gene, JW0994 gene, ycdK gene, JW0996 gene, JW0997 gene, ycdC gene, putA gene, yzpU gene, putP gene, JW1002 gene, ycdO gene, ycdB gene, phoH gene, ycdP gene, ycdQ gene, ycdR gene, ycdS gene, ycdT gene, JW1012 gene, JW1013 gene, JW1014 gene, ycdU gene, ymfD gene, ymfE gene, lit gene, intE gene, VXIS_BPP21 gene, ymfH gene, ymfI gene, ymfJ gene, RPC2_BPP22 gene, JW1132 gene, ymfL gene, ymfM gene, ymfN gene, ymfR gene, ymfO gene, JW1138 gene, JW1139 gene, ycfK gene, ymfS gene, ycfA gene, ycfE gene, pin gene, mcrA gene, JW1146 gene, ycgW gene, ycgX gene, ycgE gene, JW1150 gene, ycgZ gene, ymgA gene, JW1153 gene, ymgC gene, yahA gene, JW1156 gene, JW1157 gene, aidA gene, ymgD gene, JW1160 gene, JW1161 gene, JW1162 gene, ydfH gene, ydfZ gene, ydfI gene, shiA gene, JW1537 gene, tnpR gene, ydfM gene, Y314_LAMBD gene, nohA gene, ydfO gene, yccL gene, cspI gene, ydfR gene, vlyS gene, cspB gene, cspF gene, regQ_LAMBD gene, JW1552 gene, rem gene, hokD gene, relE gene, relB gene, ydfV gene, flxA gene, ydfW gene, ydfX gene, dicC gene, sdaC gene, yqeH gene, yqeI gene, yqeJ gene, yqeK gene, ygeF gene, ygeG gene, ygeH gene, ygeI gene, JW2822 gene, ygeK gene, JW2824 gene, JW2825 gene, JW2830 gene, ygeP gene, JW2832 gene, nlpD gene, yagR gene, ygeT gene, JW2836 gene, ygeV gene, ygeW gene, dpaL gene, ygeY gene, ygeZ gene, arcL gene, yqeB gene, JW2844 gene, ygfJ gene, gltD gene, JW2847 gene, ygfM gene, yagR gene, ygfO gene, ygfP gene, ygfQ gene, ygfR gene, ygfS gene, ygfT gene, pbuX gene, idi gene, epsM gene, exeL gene, exeC gene, JW2938 gene, JW2939 gene, JW2940 gene, JW2941 gene, yghK gene, glcB gene, glcG gene, glcF gene, glcD gene, glcC gene, JW2948 gene, yghQ gene, yghR gene, yghS gene, yghT gene, yihL gene, yihM gene, yihN gene, yshA gene, yihO gene, yihP gene, yihQ gene, yihR gene, yihS gene, yihT gene, yihU gene, yihV gene, yihW gene, yihX gene, rbn gene, yihZ gene, yiiD gene, yiiE gene, yiiF gene, yiiG gene, frvR gene, frvX gene, frvB gene, frvA gene, yiiL gene, rhaD gene, rhaA gene, rhaB gene, rhaS gene, rhaR gene, rhaT gene, ptsA gene, JW3920 gene, frwC gene, frwB gene, pflD gene, pflC gene, frwD gene, yijO gene, yijP gene, JW3986 gene, yjbF gene, yjbG gene, yjbH gene, JW3989.5 gene, yjbA gene, xylE gene, malG gene, malF gene, malE gene, malK gene, lamB gene, malM gene, yjbI gene, yjcP gene, yjcQ gene, yjcR gene, yjcS gene, alsK gene, alsE gene, alsC gene, alsA gene, alsB gene, phnQ gene, phnP gene, phnO gene, phnN gene, phnM gene, phnL gene, phnK gene, phnJ gene, phnI gene, phnH gene, phnG gene, phnF gene, phnE gene, phnD gene, phnC gene, phnB gene, phnA gene, yjdA gene and yjcZ gene, or homologous gene thereof.

[0088] (4) The E. coli mutant strain according to any one of (1) to (3) comprising chromosomal DNA that does not comprise DNA having the nucleotide sequences as shown in [1] to [18] below of the nucleotide sequence as shown in SEQ ID NO: 1 or DNA equivalent thereto.
[0089] [1] a nucleotide sequence of nucleotides 243965 to 253410
[0090] [2] a nucleotide sequence of nucleotides 261964 to 387531
[0091] [3] a nucleotide sequence of nucleotides 389139 to 403703
[0092] [4] a nucleotide sequence of nucleotides 518030 to 532711
[0093] [5] a nucleotide sequence of nucleotides 535505 to 550215
[0094] [6] a nucleotide sequence of nucleotides 563941 to 608118
[0095] [7] a nucleotide sequence of nucleotides 1048888 to 1097019
[0096] [8] a nucleotide sequence of nucleotides 1198106 to 1225146
[0097] [9] a nucleotide sequence of nucleotides 1630912 to 1641038
[0098] [20] a nucleotide sequence of nucleotides 1642632 to 1650222
[0099] [11] a nucleotide sequence of nucleotides 2985362 to 3033128
[0100] [12] a nucleotide sequence of nucleotides 3110110 to 3134341
[0101] [13] a nucleotide sequence of nucleotides 4059898 to 4079659
[0102] [14] a nucleotide sequence of nucleotides 4086451 to 4099982
[0103] [15] a nucleotide sequence of nucleotides 4139232 to 4149709
[0104] [16] a nucleotide sequence of nucleotides 4235359 to 4251735
[0105] [17] a nucleotide sequence of nucleotides 4298977 to 4311511
[0106] [18] a nucleotide sequence of nucleotides 4313318 to 4329721

[0107] (5) The E. coli mutant strain according to any one of (1) to (4) comprising chromosomal DNA that does not comprise yidF gene, yidG gene, yidH gene, yidI gene, yidJ gene, yidK gene, yidL gene, JW3657 gene, glvG gene, glvB gene, glvC gene, yidP gene, yidE gene, yidQ gene, yidR gene, yidS gene, dgoT gene, dgoA gene, dgoK gene, dgoR gene, yidW gene, yidX gene, yidA gene, yidB gene, asnA gene, yieM gene, JW3724 gene, yieN gene, kup gene, rbsD gene, rbsA gene, rbsC gene, rbsB gene, rbsK gene, rbsR gene and yieO gene, or homologous gene thereof.

[0108] (6) The E. coli mutant strain according to any one of (1) to (5) comprising chromosomal DNA that does not comprise DNA having the nucleotide sequences as shown in [1] to [3] below of the nucleotide sequence as shown in SEQ ID NO: 1 or DNA equivalent thereto.
[0109] [1] a nucleotide sequence of nucleotides 3854662 to 3865831
[0110] [2] a nucleotide sequence of nucleotides 3 867102 to 3877010
[0111] [3] a nucleotide sequence of nucleotides 3926659 to 3938878

[0112] (7) The E. coli mutant strain according to any one of (1) to (6) comprising chromosomal DNA that does not comprise yecT gene, flhE gene, flhA gene, flhB gene, cheZ gene, cheY gene, cheB gene, cheR gene, tap gene, tar gene, cheW gene, cheA gene, motB gene, motA gene, flhC gene, flhD gene, JW1882 gene, JW1883 gene, yecG gene, otsA gene, otsB gene, araH gene, araG gene, araF gene, yecI gene, yecJ gene, JW1892 gene, ftn gene, yecH gene, tyrP gene, uvrC gene, uvrY gene, yecF gene, sdiA gene, yecC gene, yecS gene, yedO gene, fliY gene, fliZ gene, fliA gene, fliC gene, fliD gene, fliS gene, fliT gene, amyA gene, yedD gene, yedE gene, yedF gene, yedK gene, yedL gene, yedN gene, yedM gene, fliE gene, fliF gene, fliG gene, fliH gene, fliI gene, fliJ gene, fliK gene, fliL gene, fliM gene, fliN gene, fliO gene, fliP gene, fliQ gene, fliR gene, rcsA gene, dsrB gene, JW1937 gene, yedA gene, vsr gene, dcm gene, yedJ gene, JW1946 gene, ompC gene, JW1948 gene, yedS gene, yedU gene, yedV gene, copR gene, yedX gene, JW1954 gene, JW1955 gene, JW1956 gene, JW1974 gene, JW1979 gene, JW1980 gene, yeeP gene, flu gene, JW1983 gene, yeeS gene, yeeU gene, yeeV gene, yeeW gene, yefJ gene, JW2013 gene, yefJ gene, yefI gene, wbbJ gene, yefG gene, rfc gene, glf gene, rfbX gene, rfbC gene, rfbA gene, rfbD gene and rfbB gene, or homologous gene thereof.

[0113] (8) The E. coli mutant strain according to any one of (1) to (7) comprising chromosomal DNA that does not comprise DNA having any of the nucleotide sequences as shown in [1] to [5] below of the nucleotide sequence as shown in SEQ ID NO: 1 or DNA equivalent thereto.
[0114] [1] a nucleotide sequence of nucleotides 1964524 to 1993075
[0115] [2] a nucleotide sequence of nucleotides 1996662 to 2028209
[0116] [3] a nucleotide sequence of nucleotides 2033449 to 2044376
[0117] [4] a nucleotide sequence of nucleotides 2069149t to 2081926
[0118] [5] a nucleotide sequence of nucleotides 2104393 to 2116064

[0119] (9) The E. coli mutant strain according to any one of (1) to (8) comprising chromosomal DNA that does not comprise intA gene, yfjH gene, alpA gene, yfjI gene, JW2606 gene, yfjJ gene, yfjK gene, yfjL gene, yfjM gene, yfjN gene, yfjO gene, yfjP gene, yfjQ gene, yfjR gene, ypjK gene, yfjS gene, yfjT gene, yfjU gene, yfjV gene, JW2622 gene, yfjW gene, JW2623.5 gene, yfjX gene, yfjY gene, yfjZ gene, ypjF gene, ypjA gene, JW2629 gene, JW2630 gene, JW2631 gene, JW2632 gene, JW2633 gene, JW2634 gene, ygaE gene, yzzM gene, yqaE gene, JW2642 gene, ygaP gene, stpA gene, JW2645 gene, ygaC gene, ygaM gene, nrdH gene, nrdI gene, nrdE gene, proV gene, proW gene, proX gene, JW2655 gene, JW2656 gene, ygaZ gene, ygaH gene, srlA gene, srlB gene, srlD gene, gutM gene, srlR gene and gutQ gene, or homologous gene thereof.

[0120] (10) The E. coli mutant strain according to any one of (1) to (9) comprising chromosomal DNA that does not copmrise DNA having the nucleotide sequences as shown in [1] to [4] below of the nucleotide sequence as shown in SEQ ID NO: 1 or DNA equivalent thereto.
[0121] [1] a nucleotide sequence of nucleotides 2755677 to 2789480
[0122] [2] a nucleotide sequence of nucleotides 2795174 to 2800890
[0123] [3] a nucleotide sequence of nucleotides 2804308 to 2810147
[0124] [4] a nucleotide sequence of nucleotides 2825314 to 2830262

[0125] (11) The E. coli mutant strain according to any one of (1) to (10) comprising chromosomal DNA that does not comprise gltF gene, yhcA gene, yhcD gene, yhcE gene, yhcF gene, yhcG gene, yhcH gene, nanK gene and nanE gene, or homologous gene thereof.

[0126] (12) The E. coli mutant strain according to any one of (1) to (11) comprising chromosomal DNA that does not comprise DNA having a nucleotide sequence comprising nucleotides 3360737 to 3370547 of the nucleotide sequence as shown in SEQ ID NO: 1 or DNA equivalent thereto.

[0127] (13) The E. coli mutant strain according to any one of (1) to (12) comprising chromosomal DNA that does not comprise yegE gene, alkA gene, yegD gene, JW2055 gene, JW2056 gene, JW2057 gene, JW2058 gene, yegM gene, yegN gene, yegO gene, yegB gene, baeS gene, baeR gene, JW2065 gene, yegQ gene, ogrK gene, JW2068 gene, JW2069 gene, yegS gene, gatR gene, JW2072 gene, JW2073 gene, gatR gene, gatD gene, gatC gene, gatB gene, gatA gene, gatZ gene, gatY gene, fbaB gene, xegT gene, yegU gene, yegV gene, yegW gene, yegX gene, molR gene, yehI gene, yehK gene, yehL gene, yehO gene, yehP gene, yehQ gene, yehR gene, yehS gene, yehT gene, yehU gene, yehV gene, yehW gene, yehX gene, yehY gene, yehZ gene, bglX gene, dld gene, pbpG gene, yohC gene, yeiQ gene, yeiR gene, yeiU gene, spr gene, rtn gene, yejA gene, yejB gene, yejE gene, yejF gene, yejG gene, bcr gene, rsuA gene, yejH gene, yeiI gene, yeiJ gene, yeiK gene, yeiL gene, yeiM gene, yeiN gene and yeiC gene, or homologous gene thereof.

[0128] (14) The E. coli mutant strain according to any one of (1) to (13) comprising chromosomal DNA that does not comprise DNA having the nucleotide sequences as shown in [1] to [4] below of the nucleotide sequence as shown in SEQ ID NO: 1 or DNA equivalent thereto.
[0129] [1] a nucleotide sequence of nucleotides 2146264 to 2187855
[0130] [2] a nucleotide sequence of nucleotides 2200669 to 2229850
[0131] [3] a nucleotide sequence of nucleotides 2270440 to 2286588
[0132] [4] a nucleotide sequence of nucleotides 2255895 to 2263491

[0133] (15) The E. coli mutant strain according to any one of (1) to (14) comprising chromosomal DNA that does not comprise cmtA gene, cmtB gene, or homologous gene thereof.

[0134] (16) The E. coli mutant strain according to any one of (1) to (15) comprising chromosomal DNA that does not comprise DNA having a nucleotide sequence comprising nucleotides 3077085 to 3078916 of the nucleotide sequence as shown in SEQ ID NO: 1 or DNA equivalent thereto.

[0135] (17) The E. coli mutant strain according to any one of (1) to (16) comprising chromosomal DNA that does not comprise intB gene, JW4228 gene, yjgW gene, yjgX gene, yjgY gene, yjgZ gene, yi41 gene, yi42 gene, yjhB gene, yjhC gene, yjhD gene, yjhE gene, yi91 gene, JW4244 gene, JW4245 gene, JW4246 gene, yjhU gene, yjhF gene, yjhG gene, yjhH gene, yjhI gene, sgcR gene, sgcE gene, sgcA gene, sgcQ gene, sgcC gene, JW4266.5 gene, sgcX gene, yjhP gene, yjhQ gene, JW4269.5 gene, JW4270 gene, JW4270.5 gene, yjhR gene, yjhS gene, yjhT gene, yjhA gene, fimB gene, fimE gene, fimA gene, fimI gene, fimC gene, fimD gene, fimF gene, fimG gene, fimH gene, gntP gene, uxuA gene, uxuB gene, uxuR gene, yjiC gene, yjiD gene, yjiE gene, iadA gene, yjiG gene, yjiH gene, yjiI gene, yjiJ gene, yjiK gene, JW4296.5 gene, yjiL gene, yjiM gene, yjiN gene, yjiO gene, yjiP gene, yjiQ gene, yjiR gene, yjiS gene, yjiT gene, yjiV gene, mcrD gene, mcrC gene, mcrB gene, yjiW gene, hsdS gene, hsdM gene, hsdR gene, mrr gene, yjiA gene, yjiX gene, yjiY gene, tsr gene, yjjL gene, JW4320 gene, yjjM gene, yjjN gene, mdoB gene and yjjA gene, or homologous gene thereof.

[0136] (18) The E. coli mutant strain according to any one of (1) to (17) comprising chromosomal DNA that does not comprise DNA having the nucleotide sequences as shown in [1] or [2] below of the nucleotide sequence as shown in SEQ ID NO: 1 or DNA equivalent thereto.
[0137] [1] a nucleotide sequence of nucleotides 4496202 to 4509534
[0138] [2] a nucleotide sequence of nucleotides 4517876 to 4599637

[0139] (19) The E. coli mutant strain according to any one of (1) to (18) comprising chromosomal DNA that does not comprise kdpF gene, ybfA gene, rhsC gene, JW0690 gene, ybfB gene, rhsA gene, ybfC gene, ybfD gene, ybfL gene, ybfD gene and ybgA gene, or homologous gene thereof.

[0140] (20) The E. coli mutant strain according to any one of (1) to (19) comprising chromosomal DNA that does not comprise DNA having a nucleotide sequence comprising nucleotides 728821 to 739593 of the nucleotide sequence as shown in SEQ ID NO: 1 or DNA equivalent thereto.

[0141] (21) The E. coli mutant strain according to any one of (1) to (20) comprising chromosomal DNA that does not comprise yjfI gene, yjfJ gene, yjfK gene, yjfL gene, yjfM gene, yjfC gene, aidB gene, yjfN gene, yjfO gene, yjfP gene, yjfQ gene, yjfR gene, sgaT gene, sgaB gene, sgaA gene, sgaH gene and sgaU gene, or homologous gene thereof.

[0142] (22) The E. coli mutant strain according to any one of (1) to (21) comprising chromosomal DNA that does not comprise DNA having a nucleotide sequence comprising nucleotides 4409533 to 4423151 of the nucleotide sequence as shown in SEQ ID NO: 1 or DNA equivalent thereto.

[0143] (23) An E. coli mutant strain comprising the gene (1) [1] above, spr gene, bcr gene, rsuA gene, or homologous gene thereof and comprising chromosomal DNA that is at least 933 kbp shorter than that of a wild-type E. coli strain.

[0144] (24) The E. coli mutant strain according to (23) comprising chromosomal DNA that comprise DNA having the nucleotide sequences as shown in [1] to [55] of (2) above and DNA having a nucleotide sequence comprising nucleotides 2270440 to 2286588 of the nucleotide sequence as shown in SEQ ID NO: 1 or DNA equivalent thereto.

[0145] (25) The E. coli mutant strain according to (23) or (24) comprising chromosomal DNA that does not comprise yafJ gene, yafK gene, yafQ gene, dinJ gene, yafL gene, yafM gene, fhiA gene, lafU gene, dinP gene, yafN gene, yafO gene, yafP gene, JW0225 gene, prffH gene, ykfI gene, yafW gene, yeeT gene, ykfG gene, yafX gene, ykfF gene, ykfB gene, yafY gene, ypjK gene, yafZ gene, ykfA gene, perR gene, JW0245 gene, JW0246 gene, JW0247 gene, ykfC gene, JW0249 gene, is5B gene, yi51 gene, mmuP gene, mmuM gene, afuC gene, JW0255 gene, insB gene, insA gene, JW0258 gene, yagB gene, yagA gene, yagE gene, yagF gene, yagG gene, yagH gene, yagI gene, argF gene, yfjI gene, yagJ gene, yagK gene, yagL gene, yagM gene, yagN gene, intF gene, yagP gene, yagQ gene, yagR gene, yagS gene, yagT gene, yagU gene, ykgJ gene, yagV gene, yagW gene, yagX gene, yagY gene, yagZ gene, ykgK gene, ykgL gene, ykgM gene, eaeH gene, JW0292 gene, JW0293 gene, ykgA gene, ykgB gene, ykgI gene, merA gene, ykgD gene, ykgE gene, ykgF gene, ykgG gene, ykgH gene, betA gene, betB gene, betI gene, betT gene, yahA gene, yahB gene, yahC gene, yahD gene, yahE gene, yahF gene, yahG gene, yahH gene, arcM gene, yahJ gene, yahK gene, yahL gene, yahM gene, yahN gene, yahO gene, prpR gene, bcpA gene, prpC gene, prpD gene, prpE gene, codB gene, codA gene, cynR gene, cynT gene, cynS gene, cynX gene, lacA gene, lacY gene, lacZ gene, lacI gene, mhpR gene, mhpA gene, mhpB gene, mhpC gene, mhpD gene, mhpF gene, mhpE gene, mhpT gene, yaiL gene, yaiM gene, adhC gene, yaiN gene, yaiO gene, JW0350 gene, yi2A gene, yi22 gene, yi24 gene, yi23 gene, yaiP gene, yaiS gene, tauA gene, tauB gene, tauC gene, ssiD gene, yaiT gene, JW0363 gene, JW0364 gene, yaiU gene, yaiV gene, ampH gene, sbmA gene, yaiW gene, yaiY gene, yaiZ gene, ddlA gene, yaiB gene, phoA gene, psiF gene, yaiC gene, ybbO gene, tesA gene, ybbA gene, ybbP gene, rhsD gene, ybbC gene, rhsE gene, ybbD gene, JW0490 gene, ybbB gene, ybbS gene, ybbT gene, ybbU gene, ybbQ gene, ybbV gene, allP gene, allA gene, ybbY gene, ybbZ gene, ylbA gene, aliC gene, ylbC gene, fdrA gene, ylbE gene, ylbE gene, ylbE gene, ylbF gene, arcC gene, intD gene, EXO_LAMBD gene, VRPP_LAMBD gene, JW0528 gene, JW0529 gene, VREN_LAMBD gene, emrE gene, ybcK gene, ybcL gene, ybcM gene, ybcN gene, ninE gene, ybcO gene, rus gene, ybcQ gene, JW0539.5 gene, nmpC gene, vlyS gene, ybcS gene, ybcT gene, vboR gene, ybcV gene, ybcW gene, nohB gene, ybcX gene, ybcY gene, JW0552 gene, appY gene, ompT gene, envY gene, ybcH gene, nfrA gene, nfrB gene, cusS gene, cusR gene, cusC gene, ylcC gene, cusB gene, cusA gene, pheP gene, ybdG gene, nfnB gene, ybdF gene, ybdJ gene, ybdK gene, hokE gene, yi81 gene, yi82 gene, ymcC gene, ymcD gene, cspH gene, cspG gene, sfa gene, yccL gene, yccM gene, torS gene, torT gene, torR gene, torC gene, torA gene, torD gene, yccD gene, cbpA gene, yccE gene, agp gene, yccJ gene, wrbA gene, yciG gene, ycdG gene, JW0992 gene, JW0993 gene, JW0994 gene, ycdK gene, JW0996 gene, JW0997 gene, ycdC gene, putA gene, yzpU gene, putP gene, JW1002 gene, ycdO gene, ycdB gene, phoH gene, ycdP gene, ycdQ gene, ycdR gene, ycdR gene, ycdS gene, ycdT gene, JW1012 gene, JW1013 gene, JW1014 gene, ycdU gene, ymfD gene, ymfE gene, lit gene, intE gene, VXIS_BPP21 gene, ymfH gene, ymfI gene, ymfJ gene, RPC2_BPP22 gene, JW1132 gene, ymfL gene, ymfM gene, ymfN gene, ymfR gene, ymfO gene, JW1138 gene, JW1139 gene, ycfK gene, ymfS gene, ycfA gene, ycfE gene, pin gene, mcrA gene, JW1146 gene, ycgW gene, ycgX gene, ycgE gene, JW1150 gene, ycgZ gene, ymgA gene, JW1153 gene, ymgC gene, yahA gene, JW1156 gene, JW1157 gene, aidA gene, ymgD gene, JW1160 gene, JW1161 gene, JW1162 gene, ydfH gene, ydfZ gene, ydfI gene, shiA gene, JW1537 gene, tnpR gene, ydfM gene, Y314_LAMBD gene, nohA gene, ydfO gene, yccL gene, cspI gene, ydfR gene, vlyS gene, cspB gene, cspF gene, regQ_LAMBD gene, JW1552 gene, rem gene, hokD gene, relE gene, relB gene, ydfV gene, flxA gene, ydfW gene, ydfX gene, dicC gene, sdaC gene, yqeH gene, yqeI gene, yqeJ gene, yqeK gene, ygeF gene, ygeG gene, ygeH gene, ygeI gene, JW2822 gene, ygeK gene, JW2824 gene, JW2825 gene, JW2830 gene, ygeP gene, JW2832 gene, nlpD gene, yagR gene, ygeT gene, JW2836 gene, ygeV gene, ygeW gene, dpaL gene, ygeY gene, ygeZ gene, arcL gene, yqeB gene, JW2844 gene, ygfJ gene, gltD gene, JW2847 gene, ygfM gene, yagR gene, ygfO gene, ygfP gene, ygfQ gene, ygfR gene, ygfS gene, ygfT gene, pbuX gene, idi gene, epsM gene, exeL gene, exeC gene, JW2938 gene, JW2939 gene, JW2940 gene, JW2941 gene, yghK gene, glcB gene, glcG gene, glcEF gene, glcD gene, glcC gene, JW2948 gene, yghQ gene, yghR gene, yghS gene, yghT gene, yihL gene, yihM gene, yihN gene, yshA gene, yihO gene, yihP gene, yihQ gene, yihR gene, yihS gene, yihT gene, yihU gene, yihV gene, yihW gene, yihX gene, rbn gene, yihZ gene, yiiD gene, yiiE gene, yiiF gene, yiiG gene, frvR gene, frvX gene, frvB gene, frvA gene, yiiL gene, rhaD gene, rhaA gene, rhaB gene, rhaS gene, rhaR gene, rhaT gene, ptsA gene, JW3920 gene, frwC gene, frwB gene, pflD gene, pflC gene, frwD gene, yijO gene, yijP gene, JW3986 gene, yjbF gene, yjbG gene, yjbH gene, JW3989.5 gene, yjbA gene, xylE gene, maiG gene, malF gene, malE gene, malK gene, lamB gene, malM gene, yjbI gene, yjcP gene, yjcQ gene, yjcR gene, yjcS gene, alsK gene, alsE gene, alsC gene, alsA gene, alsB gene, phnQ gene, phnP gene, phnO gene, phnN gene, phnM gene, phnL gene, phnK gene, phnJ gene, phnI gene, phnH gene, phnG gene, phnF gene, phnE gene, phnD gene, phnC gene, phnB gene, phnA gene, yjdA gene, yjcZ gene, yidF gene, yidG gene, yidH gene, yidI gene, yidJ gene, yidK gene, yidL gene, JW3657 gene, glvG gene, glvB gene, glvC gene, yidP gene, yidE gene, yidQ gene, yidR gene, yidS gene, dgoT gene, dgoA gene, dgoK gene, dgoR gene, yidW gene, yidX gene, yidA gene, yidB gene, asnA gene, yieM gene, JW3724 gene, yieN gene, kup gene, rbsD gene, rbsA gene, rbsC gene, rbsB gene, rbsK gene, rbsR gene, yieO gene, yecT gene, flh gene, flhA gene, flhB gene, cheZ gene, cheY gene, cheB gene, cheR gene, tap gene, tar gene, cheW gene, cheA gene, motB gene, motA gene, flhC gene, flhD gene, JW1882 gene, JW1883 gene, yecG gene, otsA gene, otsB gene, araH gene, araG gene, araF gene, yecI gene, yecJ gene, JW1892 gene, ftn gene, yecH gene, tyrP gene, uvrC gene, uvrY gene, yecF gene, sdiA gene, yecC gene, yecS gene, yedO gene, fliY gene, fliZ gene, fliA gene, fliC gene, fliD gene, fliS gene, fliT gene, amyA gene, yedD gene, yedE gene, yedF gene, yedK gene, yedL gene, yedN gene, yedM gene, fliE gene, fliF gene, fliG gene, fliH gene, fliI gene, fliJ gene, fliK gene, fliL gene, fliM gene, fliN gene, fliO gene, flip gene, fliQ gene, fliR gene, rcsA gene, dsrB gene, JW1937 gene, yedA gene, vsr gene, dcm gene, yedJ gene, JW1946 gene, ompC gene, JW1948 gene, yedS gene, yedU gene, yedV gene, copR gene, yedX gene, JW1954 gene, JW1955 gene, JW1956 gene, JW1974 gene, JW1979 gene, JW1980 gene, yeeP gene, flu gene, JW1983 gene, yeeS gene, yeeT gene, yeeU gene, yeeV gene, yeeW gene, yefJ gene, JW2013 gene, yefJ gene, yefI gene, wbbJ gene, yefG gene, rfc gene, glf gene, rfbX gene, rfbC gene, rfbA gene, rfbD gene, rfbB gene, intA gene, yfjH gene, alpA gene, yfjI gene, JW2606 gene, yfjJ gene, yfjK gene, yfjL gene, yfjM gene, yfjN gene, yfjO gene, yfjP gene, yfjQ gene, yfjR gene, ypjK gene, yfjS gene, yfjT gene, yfjU gene, yfjV gene, JW2622 gene, yfjW gene, JW2623.5 gene, yfjX gene, yfjY gene, yfjZ gene, ypjF gene, ypjA gene, JW2629 gene, JW2630 gene, JW2631 gene, JW2632 gene, JW2633 gene, JW2634 gene, ygaE gene, yzzM gene, yqaE gene, JW2642 gene, ygaP gene, stpA gene, JW2645 gene, ygaC gene, ygaM gene, nrdH gene, nrdI gene, nrdE gene, proV gene, proW gene, proX gene, JW2655 gene, JW2656 gene, ygaZ gene, ygaH gene, srlA gene, srlB gene, srlD gene, gutM gene, srlR gene, gutQ gene, gltF gene, yhcA gene, yhcD gene, yhcE gene, yhcE gene, yhcF gene, yhcG gene, yhcH gene, nanK gene, nanE gene, yegE gene, alkA gene, yegD gene, JW2055 gene, JW2056 gene, JW2057 gene, JW2058 gene, yegM gene, yegN gene, yegO gene, yegB gene, baeS gene, baeR gene, JW2065 gene, yegQ gene, ogrK gene, JW2068 gene, JW2069 gene, yegS gene, gatR gene, JW2072 gene, JW2073 gene, gatR gene, gatD gene, gatC gene, gatB gene, gatA gene, gatZ gene, gatY gene, fbaB gene, xegT gene, yegU gene, yegV gene, yegW gene, yegX gene, molR gene, yehI gene, yehK gene, yehL gene, yehO gene, yehP gene, yehQ gene, yehR gene, yehS gene, yehT gene, yehU gene, yehV gene, yehW gene, yehX gene, yehY gene, yehZ gene, bglX gene, dld gene, pbpG gene, yohC gene, yeiI gene, yeiJ gene, yeiK gene, yeiL gene, yeiM gene, yeiN gene, yeiC gene, cmtA gene, cmtB gene, intB gene, JW4228 gene, yjgW gene, yjgX gene, yjgY gene, yjgZ gene, yi41 gene, yi42 gene, yjhB gene, yjhC gene, yjhD gene, yjhE gene, yi91 gene, JW4244 gene, JW4245 gene, JW4246 gene, yjhU gene, yjhF gene, yjhG gene, yjhH gene, yjhI gene, sgcR gene, sgcE gene, sgcA gene, sgcQ gene, sgcC gene, JW4266.5 gene, sgcX gene, yjhP gene, yjhQ gene, JW4269.5 gene, JW4270 gene, JW4270.5 gene, yjhR gene, yjhS gene, yjhT gene, yjhA gene, fimB gene, fimE gene, fimA gene, fimI gene, fimC gene, fimD gene, fimF gene, fimG gene, fimH gene, gntP gene, uxuA gene, uxuB gene, uxuR gene, yjiC gene, yjiD gene, yjiE gene, iadA gene, yjiG gene, yjiH gene, yjiI gene, yjiJ gene, yjiK gene, JW4296.5 gene, yjiL gene, yjiM gene, yjiN gene, yjiO gene, yjiP gene, yjiQ gene, yjiR gene, yjiS gene, yjiT gene, yjiV gene, mcrD gene, mcrC gene, mcrB gene, yjiW gene, hsdS gene, hsdM gene, hsdR gene, mrr gene, yjiA gene, yjiX gene, yjiY gene, tsr gene, yjjL gene, JW4320 gene, yjjM gene, yjjN gene, mdoB gene, yjjA gene, kdpF gene, ybfA gene, rhsC gene, JW0690 gene, ybfB gene, rhsA gene, ybfC gene, ybfL gene, ybfD gene, ybgA gene, yjfI gene, yjfJ gene, yjfK gene, yjfL gene, yjfM gene, yjfC gene, aidB gene, yjfN gene, yjfO gene, yjfP gene, yjfQ gene, yjfR gene, sgaT gene, sgaB gene, sgaA gene, sgaH gene, sgaU gene, rhsB gene, JW3448 gene, yhhH gene, yibA gene, yhhI gene, yhhJ gene, yhiH gene, yhiI gene, yhiJ gene, yhiK gene, yhiL gene, yhiM gene, yhiN gene, JW0782 gene, ybiA gene, dinG gene, ybiB gene, ybiC gene, ybiJ gene, ybiI gene, ybiX gene, ybiL gene, ybiM gene, ybiN gene, ybiO gene, glnQ gene, glnP gene, glnH gene, yliA gene, yliB gene, yliC gene, yliD gene, JW0817 gene, JW0818 gene, yliG gene, yliH gene, yliI gene, yliJ gene, dacC gene, deoR gene, ybjG gene, ybjC gene, mdaA gene, rimK gene, ybjN gene, potF gene, potG gene, potH gene, potI gene, ybjO gene, ybjF gene, artJ gene, artM gene, artQ gene, artI gene, artP gene, ybjP gene, JW0850 gene, JW0851 gene, JW0852 gene, ybjT gene and ltaA gene, or homologous gene thereof.

[0146] (26) The E. coli mutant strain according to any one of (23) to (25) comprising chromosomal DNA that does not comprise DNA having the nucleotide sequences as shown in [1] to [43] of the nucleotide sequence as shown in SEQ ID NO: 1 or DNA equivalent thereto.
[0147] [1] a nucleotide sequence of nucleotides 243965 to 253410
[0148] [2] a nucleotide sequence of nucleotides 261964 to 387531
[0149] [3] a nucleotide sequence of nucleotides 389139 to 403703
[0150] [4] a nucleotide sequence of nucleotides 518030 to 532711
[0151] [5] a nucleotide sequence of nucleotides 535505 to 550215
[0152] [6] a nucleotide sequence of nucleotides 563941 to 608118
[0153] [7] a nucleotide sequence of nucleotides 728821 to 739593
[0154] [8] a nucleotide sequence of nucleotides 832552 to 848089
[0155] [9] a nucleotide sequence of nucleotides 867638 to 883473
[0156] [10] a nucleotide sequence of nucleotides 890998 to 909379
[0157] [11] a nucleotide sequence of nucleotides 1048888 to 1097019
[0158] [12] a nucleotide sequence of nucleotides 1198106 to 1225146
[0159] [13] a nucleotide sequence of nucleotides 1630912 to 1641038
[0160] [14] a nucleotide sequence of nucleotides 1642632 to 1650222
[0161] [15] a nucleotide sequence of nucleotides 1964524 to 1993075
[0162] [16] a nucleotide sequence of nucleotides 1996662 to 2028209
[0163] [17] a nucleotide sequence of nucleotides 2033449 to 2044376
[0164] [18] a nucleotide sequence of nucleotides 2069149 to 2081926
[0165] [19] a nucleotide sequence of nucleotides 2104393 to 2116064
[0166] [20] a nucleotide sequence of nucleotides 2146264 to 2187855
[0167] [21] a nucleotide sequence of nucleotides 2200669 to 2229850
[0168] [22] a nucleotide sequence of nucleotides 2255895 to 2263491
[0169] [23] a nucleotide sequence of nucleotides 2755677 to 2789480
[0170] [24] a nucleotide sequence of nucleotides 2795174 to 2800890
[0171] [25] a nucleotide sequence of nucleotides 2804308 to 2810147
[0172] [26] a nucleotide sequence of nucleotides 2825314 to 2830262
[0173] [27] a nucleotide sequence of nucleotides 2985362 to 3033128
[0174] [28] a nucleotide sequence of nucleotides 3077085 to 3078916
[0175] [29] a nucleotide sequence of nucleotides 3110110 to 3134341
[0176] [30] a nucleotide sequence of nucleotides 3360737 to 3370547
[0177] [31] a nucleotide sequence of nucleotides 3618576 to 3636916
[0178] [32] a nucleotide sequence of nucleotides 3854662 to 3865831
[0179] [33] a nucleotide sequence of nucleotides 3867102 to 3877010
[0180] [34] a nucleotide sequence of nucleotides 3926659 to 3938878
[0181] [35] a nucleotide sequence of nucleotides 4059898 to 4079659
[0182] [36] a nucleotide sequence of nucleotides 4086451 to 4099982
[0183] [37] a nucleotide sequence of nucleotides 4139232 to 4149709
[0184] [38] a nucleotide sequence of nucleotides 4235359 to 4251735
[0185] [39] a nucleotide sequence of nucleotides 4298977 to 4311511
[0186] [40] a nucleotide sequence of nucleotides 4313318 to 4329721
[0187] [41] a nucleotide sequence of nucleotides 4409533 to 4423151
[0188] [42] a nucleotide sequence of nucleotides 4496202 to 4509534
[0189] [43] a nucleotide sequence of nucleotides 4517876 to 4599637

[0190] (27) The E. coli mutant strain according to any one of (23) to (26) comprising chromosomal DNA that does not comprise ygiS gene, ygiT gene, ygiU gene, JW2991 gene, ygiW gene, ygiX gene, ygiY gene, ygiZ gene, mdaB gene and ygiN gene, or homologous gene thereof.

[0191] (28) The E. coli mutant strain according to any one of (23) to (27) comprising chromosomal DNA that does not comprise DNA having a nucleotide sequence comprising nucleotides 3165628 to 3172940 of the nucleotide sequence as shown in SEQ ID NO: 1 or DNA equivalent thereto.

[0192] (29) The E. coli mutant strain according to any one of (23) to (28) comprising chromosomal DNA that does not comprise ybeL gene, ybeQ gene, ybeR gene, ybeS gene, ybeT gene, ybeU gene, ybeV gene, ybeW gene, ybeK gene, gltL gene, gltK gene, gltJ gene, ybeJ gene and JW0651 gene, or homologous gene thereof.

[0193] (30) The E. coli mutant strain according to any one of (23) to (29) comprising chromosomal DNA that does not comprise DNA having a nucleotide sequence comprising nucleotides 675104 to 689374 of the nucleotide sequence as shown in SEQ ID NO: 1 or DNA equivalent thereto.

[0194] (31) The E. coli mutant strain according to any one of (23) to (30) comprising chromosomal DNA that does not comprise yfcC gene, JW2296 gene, yfcE gene, yfcF gene, yfcG gene, folX gene, JW2301 gene, yfcI gene, hisP gene, hisM gene, hisQ gene, hisJ gene, argT gene, yfdB gene, JW2346 gene, yfdH gene, JW2348 gene, yfdK gene, yfdL gene, yfdM gene, xylU gene, yfdN gene, yfdO gene, JW2356 gene, JW2357 gene, JW2358 gene, JW2359 gene, JW2360 gene, JW2378 gene, yqhT gene, ptwC gene andptwB gene, or homologous gene thereof.

[0195] (32) The E. coli mutant strain according to any one of (23) to (31) comprising chromosomal DNA that does not comprise DNA having the nucleotide sequences as shown in [1] to [3] below of the nucleotide sequence as shown in SEQ ID NO: 1 or DNA equivalent thereto.
[0196] [1] a nucleotide sequence of nucleotides 2423365 to 2434098
[0197] [2] a nucleotide sequence of nucleotides 2472852 to 2482482
[0198] [3] a nucleotide sequence of nucleotides 2505075 to 2514557

[0199] (33) The E. coli mutant strain according to any one of (23) to (32) comprising chromosomal DNA that does not comprise pinO gene, gspA gene, gspC gene, gspD gene, gspE gene, hofF gene, hofG gene, hofH gene, gspI gene, gspJ gene, gspK gene, gspL gene, pshM gene, hofD gene, bfr gene, yheA gene and chiA gene, or homologous gene thereof.

[0200] (34) The E. coli mutant strain according to any one of (23) to (33) comprising chromosomal DNA that does not comprise DNA having a nucleotide sequence comprising nucleotides 3453021 to 3469366 of the nucleotide sequence as shown in SEQ ID NO: 1 or DNA equivalent thereto.

[0201] (35) The E. coli mutant strain according to any one of (23) to (34) comprising chromosomal DNA that does not comprise elaB gene, elaA gene, elaC gene, elaD gene, yfbK gene, yfbL gene, yfbM gene, yfbN gene, JW2269 gene and JW2270 gene, or homologous gene thereof.

[0202] (36) The E. coli mutant strain according to any one of (23) to (35) comprising chromosomal DNA that does not comprise DNA having a nucleotide sequence comprising nucleotides 2386262 to 2395471 of the nucleotide sequence as shown in SEQ ID NO: 1 or DNA equivalent thereto.

[0203] (37) The E. coli mutant strain according to any one of (23) to (36) comprising chromosomal DNA that does not comprise yhdJ gene, yhdU gene, envR gene, acrE gene, envD gene, yhdV gene, yhdW gene, yhdX gene and yhdY gene, or homologous gene thereof.

[0204] (38) The E. coli mutant strain according to any one of (23) to (37) comprising chromosomal DNA that does not comprise DNA having a nucleotide sequence comprising nucleotides 3411160 to 3420878 of the nucleotide sequence as shown in SEQ ID NO: 1 or DNA equivalent thereto.

[0205] (39) The E. Coli mutant strain according to any one of (23) to (38) comprising chromosomal DNA that does not comprise chpA gene or homologous gene thereof.

[0206] (40) The E. coli mutant strain according to any one of (23) to (39) comprising chromosomal DNA that does not comprise DNA having a nucleotide sequence comprising nucleotides 2910274 to 2910573 of the nucleotide sequence as shown in SEQ ID NO: 1 or DNA equivalent thereto.

[0207] (41) The E. coli mutant strain according to any one of (23) to (40) comprising chromosomal DNA that does not comprise fhuA gene, fhuC gene, fhuD gene fhuB gene, or homologous gene thereof.

[0208] (42) The E. coli mutant strain according to any one of (23) to (41) comprising chromosomal DNA that does not comprise DNA having a nucleotide sequence comprising nucleotides 167065 to 172979 of the nucleotide sequence as shown in SEQ ID NO: 1 or DNA equivalent thereto.

[0209] (43) The E. coli mutant strain according to any one of (1) to (42) obtained via modification by a method selected from among the following [1] to [5]:
[0210] [1] a method for reducing or removing at least one mechanism for regulating biosynthesis of the useful substance;
[0211] [2] a method for increasing the expression level of at least one enzyme associated with biosynthesis of the useful substance;
[0212] [3] a method for increasing the copy number of at least one enzyme gene associated with biosynthesis of the useful substance;
[0213] [4] a method for attenuating or blocking at least one metabolic pathway which branches from the biosynthetic pathway of the useful substance into metabolites other than the useful substance; or
[0214] [5] a method for selecting a strain that exhibits higher resistance to an analogue of a useful substance than a wild-type E. coli strain.

[0215] (44) The E. coli mutant strain according to any one of (1) to (43), wherein the E. coli strain is the E. coli K-12, B, or W strain.

[0216] (45) The E. coli mutant strain according to (44), wherein the E. coli K-12 strain is the E. coli W3110 strain (ATCC27325) or the E. coli MG1655 strain (ATCC47076).

[0217] (46) A method for producing a useful substance comprising culturing an E. coli mutant strain according to any one of (1) to (45) in a medium so as to generate and accumulate such useful substance in the culture and recovering the useful substance from the culture

[0218] (47) The method according to any one of (43) to (46), wherein the useful substance is selected from the group consisting of proteins, peptides, amino acids, nucleic acids, vitamins, saccharides, organic acids, and lipids.

### Effects of the Invention

[0219] The present invention can provide an E. coli mutant, the amount of cells of which, after a given period of culture, is larger than that of a wild-type E. coli strain, and a process for producing a useful substance using such mutant.

### BRIEF DESCRIPTION OF THE DRAWINGS

[0220] FIG. 1 shows the structure of a DNA fragment comprising sacB gene and cat gene ligated thereto.

### DESCRIPTION OF REFERENCE SYMBOLS

[0221] sacB represents the sacB gene, and cat represents the cat gene.

### BEST MODES FOR CARRYING OUT THE INVENTION

[0222] Wild-type E. coli strains may be any E. coli strains that are found in natural populations at the highest frequency. Examples thereof include the E. coli W3110 strain (ATCC27325) and the E. coli MG1655 strain (ATCC47076) that belong to the E. coli K-12 strain, the ATCC11303 strain that belongs to the E. coli B strain, and the ATCC9637 strain that belongs to the E. coli W strain.

[0223] Table 1, Table 2, and SEQ ID NO: 1 of the present description and the Internet site URL::http://gib.genes.nig.ac.jp/single/index.php?spid=Ecol_K12_W3110 include nucleotide sequences of the genes identified with JW numbers. The numbers with “JW” represent gene numbers registered at the DNA Data Bank of Japan.

[0224] The nucleotide sequence as shown in SEQ ID NO: 1 is the nucleotide sequence of chromosomal DNA of the E. coli W3110 strain registered as of Oct. 29, 2004 on the above Internet site.

[0225] The term “chromosomal DNA that contains genes” refers to chromosomal DNA that contains a structural gene and a region containing a specific regulatory function such as a prmoter, operator or the like of a given gene.

[0226] The term “chromosomal DNA that does not contain gene” refers to chromosomal DNA that does not contain a part of or an entire structural gene of a given gene or chromosomal DNA that does not contain a region having a specific regulatory function, such as a promoter and/or operator of such gene.

[0227] The “chromosomal DNA that does not contain part of a structural gene” may be any chromosomal DNA that does not contain part of a structural gene, and a functional protein is not transcribed and expressed from the structural gene. Examples thereof include DNA that has no initiation codon due to a lack of the 5′ end region of the structural gene and chromosomal DNA that lacks most of the 3′ end region, such as at least 10%, preferably at least 20%, more preferably at least 30%, and further preferably at least 40% of the entire 3′ end region. Chromosomal DNA that does not contain two adjacent genes may be chromosomal DNA that does not contain DNA comprising a nucleotide sequence located between such genes.

[0228] The term “homologous genes” refers to genes that have homology in terms of the nucleotide sequences of such genes or genes encoding the proteins which have homology in terms of amino acid sequences among E. coli species. Having homology refers to having similarity of at least 85%, preferably at least 90%, more preferably at least 95%, farther preferably at least 98%, and particularly preferably at least 99%, in the case of nucleotide sequences. In the case of amino acid sequences, such term refers to having similarity of at least 80%, preferably at least 90%, more preferably at least 95%, farther preferably at least 98%, and particularly preferably at least 99%.

[0229] “DNA equivalent to DNA having a nucleotide sequence represented by given nucleotide numbers in the nucleotide sequence as shown in SEQ ID NO: 1” refers to DNA that is substantially the same as DNA having a nucleotide sequence represented by such given nucleotide numbers of an E. coli species in terms of the structure of the gene contained and the position on chromosomal DNA. When structures of genes contained in DNA are substantially the same as each other, genes contained in such DNA are identical or homologous to each other, and arranged in the same order. In that case, nucleotide sequences may differ among genes. When the DNA having a nucleotide sequence represented by given nucleotide numbers contains an insertion sequence, however, such insertion sequence may be absent in DNA equivalent to the aforementioned DNA. “Substantially the same positions on chromosomal DNA” refers to the following conditions. When adenine of the initiation codon of the ThrA gene on E. coli chromosomal DNA is designated as No. 1 and the nucleotide sequence of chromosomal DNA is numbered along the coding chain of the ThrA gene, differences between such nucleotide numbers and the given nucleotide numbers are 50 or smaller, preferably 30 or smaller, more preferably 10 or smaller, and further preferably 5 or smaller. When the DNA having a nucleotide sequence represented by given nucleotide numbers contains an insertion sequence, however, DNA equivalent to the aforementioned DNA does not necessarily contain such insertion sequence. Thus, such insertion sequence and nucleotide numbers may be different. An example of DNA equivalent to DNA having a nucleotide sequence represented by given nucleotide numbers of the nucleotide sequence as shown in SEQ ID NO: 1 is DNA having sequence similarity of at least 80%, preferably at least 90%, more preferably at least 95%, further preferably at least 98%, and particularly preferably at least 99% with the nucleotide sequence represented by given nucleotide numbers.

[0230] Amino acid sequence or nucleotide sequence homology can be determined with the utilization of the BLAST algorithm of Karlin and Altschul (Pro. Natl. Acad. Sci., U.S.A., 90 5873, 1993) or the FASTA algorithm (Methods Enzymol., 183, 63, 1990). Based on the BLAST algorithm, programs referred to as BLASTN or BLASTX have been developed (J. Mol. Biol., 215, 403, 1990). When analyzing nucleotide sequences by BLASTN based on BLAST, the score parameter is set to 100 and the word length parameter is set to 12, for example. When analyzing amino acid sequences via BLASTX based on BLAST, the score parameter is set to 50 and the word length parameter is set to 3, for example. When using BLAST and Gapped BLAST programs, the default parameters thereof are used. Specific procedures of such analytical methods are known (http://www.ncbi.nlm.nih.gov.).

[0231] 1. E. coli Mutant Strain of the Present Invention

[0232] The E. coli mutant strain of the present invention may be any E. coli mutant strain comprising chromosomal DNA that does not comprise any gene excluding the genes [1] and

[0233] that are present on chromosomal DNA of a wild-type E. coli strain or homologous genes thereof, provided that it comprises the following genes [1] and [2] or homologous genes thereof and having chromosomal DNA that is at least 470 kbp shorter than that of a wild-type E. coli strain,

[0234] [1] thrA gene, thrB gene, thrc gene, talB gene, mog gene, htgA gene, dnaK gene, dnaJ gene, hokC gene, nhaA gene, nhaR gene, rpsT gene, ribF gene, ileS gene, lspA gene, fkpB gene, lytB gene, dapB gene, carA gene, carB gene, caiF gene, caiE gene, caiD gene, caiC gene, caiB gene, caiA gene, caiT gene, fixA gene, fixB gene, fixC gene, fixX gene, kefC gene, folA gene, apaH gene, apaG gene, ksgA gene, pdxA gene, surA gene, imp gene, djlA gene, rluA gene, hepA gene, polB gene, araD gene, araA gene, araB gene, araC gene, tbpA gene, leuD gene, leuC gene, leuB gene, leuA gene, leuL gene, leuO gene, ilvI gene, ilvH gene, fruR gene, ftsL gene, ftsI gene, murE gene, murF gene, mraY gene, murD gene, ftsW gene, murG gene, murC gene, ddlB gene, ftsQ gene, ftsA gene, ftsZ gene, lpxC gene, secA gene, mutT gene, yacE gene, guaC gene, hofC gene, hofB gene, ppdD gene, nadC gene, ampD gene, ampE gene, aroP gene, pdhR gene, aceE gene, aceF gene, lpdA gene, acnB gene, speD gene, speE gene, gcd gene, hpt gene, yadF gene, panD gene, panC gene, panB gene, htrE gene, ecpD gene, folK gene, pcnB gene, dksA gene, sfsA gene, ligT gene, hrpB gene, ponB gene, hemL gene, pfs gene, dgt gene, htrA gene, dapD gene, glnD gene, map gene, rpsB gene, tsf gene, smb gene, rrf gene, dxr gene, rth gene, cdsA gene, yaeL gene, hlpA gene, lpxD gene, fabZ gene, lpxA gene, lpxB gene, rnhB gene, dnaE gene, accA gene, ldcC gene, mesJ gene, rof gene, cutF gene, proS gene, rcsF gene, abc gene, dniR gene, gloB gene, mhA gene, dnaQ gene, up18 gene, gmhA gene, pepD gene, gpt gene, crl gene, phoE gene, proB gene, proA gene, hemB gene, proC gene, aroL gene, aroM gene, araJ gene, sbcC gene, sbcD gene, phoB gene, phoR gene, brnQ gene, proY gene, malZ gene, queA gene, tgt gene, secD gene, secF gene, tsx gene, ribD gene, ribH gene, nusB gene, thiL gene, pgpA gene, dxs gene, ispA gene, xseB gene, thiI gene, thiJ gene, apbA gene, cyoE gene, cyoD gene, cyoC gene, cyoB gene, cyoA gene, ampG gene, bolA gene, tig gene, clpP gene, clpX gene, lon gene, hupB gene, cof gene, mdlA gene, mdlB gene, glnK gene, amtB gene, tesB gene, maa gene, hha gene, acrB gene, acrA gene, acrR gene, aefA gene, priC gene, apt gene, dnaX gene, recR gene, htpG gene, adk gene, hemH gene, aes gene, gsk gene, fsr gene, ushA gene, cueR gene, gel gene, gip gene, purK gene, purE gene, ybbF gene, ppiB gene, cysS gene, folD gene, sfmA gene, sfmC gene, sfmD gene, sfmH gene, sfmF gene, fimZ gene, entD gene, fepA gene, fes gene, entF gene, fepE gene, fepC gene, fepG gene, fepD gene, fepB gene, entC gene, entE gene, entB gene, entA gene, cstA gene, dsbG gene, ahpC gene, ahpF gene, mk gene, ma gene, citT gene, citG gene, citX gene, citF gene, citE gene, citD gene, citC gene, citA gene, citB gene, dcuC gene, dcuC gene, crcA gene, cspE gene, crcB gene, lipA gene, lipB gene, dacA gene, rlpA gene, mrdB gene, mrdA gene, phpB gene, nadD gene, holA gene, rlpB gene, leuS gene, lnt gene, phoL gene, ubiF gene, asnB gene, nagD gene, nagC gene, nagA gene, nagB gene, nagE gene, glnS gene, fur gene, fldA gene, seqA gene, pgm gene, potE gene, speF gene, kdpE gene, kdpD gene, kdpC gene, kdpB gene, kdpA gene, phrB gene, end8 gene, abrB gene, gltA gene, sdhC gene, sdhD gene, sdhA gene, sdhB gene, sucA gene, sucB gene, sucC gene, sucD gene, farR gene, hrsA gene, cydA gene, cydB gene, tolQ gene, toIR gene, tolA gene, tolB gene, pal gene, nadA gene, pnuC gene, czcD gene, aroG gene, gpmA gene, galM gene, galK gene, galT gene, galE gene, modF gene, modE gene, modA gene, modB gene, modC gene, bioA gene, bioB gene, bioF gene, bioC gene, bioD gene, uvrB gene, moaA gene, moaB gene, moaC gene, moaD gene, moaE gene, rhlE gene, dps gene, ompX gene, mipB gene, moeB gene, moeA gene, mdfA gene, grxA gene, poxB gene, aqpZ gene, cspD gene, clpA gene, infA gene, aat gene, cydC gene, cydD gene, trxB gene, lrp gene, ftsK gene, lolA gene, serS gene, dmsA gene, dmsB gene, dmsC gene, pflA gene, pflB gene, focA gene, serC gene, aroA gene, cmk gene, rpsA gene, himD gene, msbA gene, lpxK gene, kdsB gene, smtA gene, mukF gene, kicA gene, mukB gene, aspC gene, ompF gene, asnS gene, pncB gene, pepN gene, ssuB gene, ssuC gene, ssuD gene, ssuA gene, ssuE gene, pyrD gene, uup gene, pqiA gene, pqiB gene, rmf gene, fabA gene, ompA gene, sulA gene, helD gene, mgsA gene, acyP gene, hyaA gene, hyaB gene, hyaC gene, hyaD gene, hyaE gene, hyaF gene, appC gene, appB gene, appA gene, csgG gene, csgF gene, csgE gene, csgD gene, csgB gene, csgA gene, csgC gene, sfaA gene, mdoG gene, mdoH gene, msyB gene, htrB gene, solA gene, dinI gene, pyrC gene, grxB gene, rimJ gene, mviM gene, mviN gene, flgN gene, flgM gene, flgA gene, flgB gene, flgC gene, flgD gene, flgE gene, flgF gene, flgG gene, flgH gene, flgI gene, flgJ gene, flgK gene, flgL gene, rne gene, rluC gene, rpmF gene, plsX gene, fabH gene, fabD gene, fabG gene, acpP gene, fabF gene, pabC gene, tmik gene, holB gene, ptsG gene, fhuE gene, nagZ gene, ndh gene, mfd gene, ycfU gene, ycfV gene, ycfW gene, cobB gene, potD gene, potC gene, potB gene, potA gene, pepT gene, phoQ gene, phoP gene, purB gene, trmU gene, icdA gene, minE gene, minD gene, minC gene, clyA gene, umuD gene, umuC gene, dsbB gene, nhaB gene, fadR gene, dadA gene, dadX gene, ldcA gene, mltE gene, tagl gene, treA gene, dhaR gene, pth gene, prsA gene, ychB gene, hemM gene, hemA gene, prfA gene, hemK gene, kdsA gene, chaA gene, chaB gene, chaC gene, narL gene, narX gene, narK gene, narG gene, narH gene, narJ gene, narI gene, tpr gene, purU gene, sprE gene, galU gene, hns gene, tdk gene, adhE gene, oppA gene, oppB gene, oppC gene, oppD gene, oppF gene, cls gene, kch gene, tonB gene, trpA gene, trpB gene, trpC gene, trpD gene, trpE gene, trpL gene, btuR gene, sohB gene, topA gene, cysB gene, acnA gene, ribA gene, pgpB gene, pyrF gene, osmB gene, rnb gene, envM gene, sapF gene, sapD gene, sapC gene, sapB gene, sapA gene, aldH gene, ordL gene, goaG gene, pspF gene, pspA gene, pspB gene, pspC gene, pspD gene, pspE gene, sucP gene, ompG gene, tyrR gene, tpx gene, mppA gene, fnr gene, ogt gene, dbpA gene, intR gene, lar gene, recT gene, recE gene, racC gene, kil gene, sieB gene, racR gene, dnaC gene, enpP gene, trkG gene, VMTH_LAMBD gene, VLOM_LAMBD gene, tnpO gene, upo3 gene, ompN gene, nifJ gene, hslJ gene, ldhA gene, feaR gene, feaB gene, tynA gene, paaZ gene, paaA gene, paaB gene, paaC gene, paaD gene, paaE gene, paaF gene, paaG gene, paaH gene, paaI gene, paaJ gene, paaK gene, paaX gene, paaY gene, acpD gene, hrpA gene, aldA gene, gapC gene, gapC gene, cybB gene, trg gene, rimL gene, tehA gene, tehB gene, prtC gene, potA gene, potC gene, ansP gene, nhoA gene, narV gene, narW gene, narY gene, narZ gene, narU gene, fdnG gene, fdnH gene, fdnI gene, adhP gene, sfcA gene, rpsV gene, osmC gene, dos gene, xasA gene, gadB gene, pqqL gene, chuR gene, hipA gene, hipB gene, tam gene, uxaB gene, marC gene, marR gene, marA gene, marB gene, dcp gene, lycV gene, dicA gene, dicB gene, rspB gene, rspA gene, speG gene, dmsB gene, dmsC gene, bioD gene, mlc gene, asr gene, ebr gene, pntB gene, pntA gene, arcD gene, rstA gene, rstB gene, tus gene, fumC gene, fumA gene, manA gene, uidC gene, uidB gene, uidA gene, uidR gene, hdhA gene, malI gene, malX gene, malY gene, add gene, blr gene, nth gene, gst gene, pdxY gene, tyrS gene, pdxH gene, slyB gene, slyA gene, sodC gene, nemA gene, gloA gene, rnt gene, lhr gene, sodB gene, araJ gene, purR gene, cfa gene, ribE gene, ag43 gene, phsC gene, nrfC gene, pykF gene, lpp gene, sufS gene, aroD gene, ppsA gene, aroH gene, nlpC gene, btuD gene, btuE gene, btuC gene, himA gene, pheT gene, pheS gene, pheM gene, rplT gene, rpmI gene, infC gene, thrS gene, arp gene, pfkB gene, cedA gene, katE gene, celF gene, celD gene, celC gene, celB gene, celA gene, osmE gene, nadE gene, spy gene, astE gene, astB gene, astD gene, astA gene, cstC gene, xthA gene, gdhA gene, topB gene, selD gene, sppA gene, ansA gene, tdh gene, gapA gene, ttuC gene, caiT gene, rnd gene, fadD gene, slp gene, pabB gene, sdaA gene, manX gene, manY gene, manZ gene, rrmA gene, cspC gene, kdgR gene, tcmA gene, htpX gene, prc gene, pqiB gene, pphA gene, holE gene, exoX gene, ptrB gene, purT gene, eda gene, edd gene, zwf gene, pykA gene, mlt gene, znuA gene, znuC gene, ruvB gene, ruvA gene, ruvC gene, ntpA gene, aspS gene, bisZ gene, torY gene, cutC gene, argS gene, pgsA gene, amn gene, cbl gene, nac gene, erfK gene, cobT gene, cobS gene, cobU gene, gyrI gene, phsE gene, sbcB gene, hisL gene, hisG gene, hisD gene, hisC gene, hisB gene, hisH gene, hisA gene, hisF gene, hisI gene, wzz gene, ugd gene, gnd gene, galF gene, wcaM gene, wcaL gene, wcaK gene, wzxC gene, wcaJ gene, cpsG gene, cpsB gene, wcal gene, wcaH gene, wcaG gene, gmd gene, wcaF gene, wcaE gene, wcaD gene, wcaC gene, wcaB gene, wcaA gene, wzb gene, wza gene, asmA gene, dcd gene, udk gene, thiD gene, thiM gene, mrp gene, metG gene, cdd gene, sanA gene, mglC gene, mglA gene, mglB gene, galS gene, folE gene, cirA gene, lysP gene, nfo gene, fruA gene, fruK gene, fruB gene, rplY gene, narP gene, ccmH gene, dsbE gene, ccmF gene, ccmE gene, ccmD gene, ccmC gene, ccmB gene, ccmA gene, napC gene, napB gene, napH gene, napG gene, napA gene, napD gene, napF gene, eco gene, alkB gene, ada gene, apbE gene, rcsB gene, rcsC gene, atoS gene, atoC gene, atoD gene, atoA gene, atoE gene, atoB gene, gyrA gene, ubiG gene, nrdA gene, nrdB gene, inaA gene, glpQ gene, glpT gene, glpA gene, glpB gene, glpC gene, cinA gene, ais gene, pmrD gene, menE gene, menC gene, menB gene, menD gene, menF gene, nuoN gene, nuoM gene, nuoL gene, nuoK gene, nuoJ gene, nuoI gene, nuoH gene, nuoG gene, nuoF gene, nuoE gene, nuoD gene, nuoB gene, nuoA gene, lrhA gene, ackA gene, pta gene, ubiX gene, purF gene, dedE gene, dedD gene, folC gene, accD gene, dedA gene, truA gene, usg1 gene, pdxB gene, div gene, fabB gene, ddpX gene, mepA gene, aroC gene, sixA gene, fadL gene, vacJ gene, dsdC gene, dsdX gene, dsdA gene, emrY gene, emrK gene, evgA gene, evgS gene, bifF gene, ddg gene, glk gene, mntH gene, nupC gene, gltX gene, xapR gene, xapB gene, xapA gene, lig gene, zipA gene, cysZ gene, cysK gene, ptsH gene, ptsI gene, gsr gene, pdxK gene, cysM gene, cysA gene, cysW gene, cysU gene, cysP gene, ucpA gene, ptbA gene, amiA gene, hemF gene, cchA gene, eutC gene, eutB gene, eutH gene, eutG gene, eutJ gene, eutE gene, cchB gene, eutI gene, talA gene, tktB gene, aegA gene, narQ gene, acrD gene, dapE gene, purC gene, nlpB gene, dapA gene, gcvR gene, bcp gene, hyfA gene, hyfB gene, hyfC gene, hyfD gene, hyffE gene, hyfF gene, hyfG gene, hyfH gene, hyfI gene, hyfJ gene, hyfR gene, focB gene, perM gene, yfgE gene, uraA gene, upp gene, purM gene, purN gene, ppk gene, ppx gene, guaA gene, guaB gene, xseA gene, hisS gene, gcpE gene, ndk gene, pbpC gene, sseA gene, sseB gene, pepB gene, fdx gene, hscA gene, hscB gene, iscU gene, iscS gene, iscR gene, suhB gene, csiE gene, dgxA gene, dgxB gene, hcaC gene, hcaB gene, hcaD gene, glyA gene, hmpA gene, glnB gene, purL gene, acpS gene, pdxJ gene, recO gene, era gene, me gene, lepB gene, lepA gene, rseC gene, rseB gene, rseA gene, rpoE gene, nadB gene, srmB gene, ung gene, trx2 gene, pssA gene, kgtP gene, clpB gene, rluD gene, pheL gene, pheA gene, tyrA gene, aroF gene, rplS gene, trmD gene, rimM gene, rpsP gene, ffh gene, grpE gene, recN gene, smpA gene, smpB gene, gabD gene, gabT gene, gabP gene, nrdF gene, emrR gene, emrA gene, emrB gene, gshA gene, csrA gene, alaS gene, oraA gene, recA gene, mltB gene, hypF gene, hydN gene, ascG gene, ascF gene, ascB gene, hycI gene, hycH gene, hycG gene, hycF gene, hycE gene, hycD gene, hycC gene, hycB gene, hycA gene, hypA gene, hypB gene, hypC gene, hypD gene, hypE gene, fhlA gene, mutS gene, prpB gene, rpoS gene, pcm gene, surE gene, ygbB gene, ygbP gene, ygbQ gene, cysC gene, cysN gene, cysD gene, iap gene, cysH gene, cysI gene, cysJ gene, ptpS gene, eno gene, pyrG gene, mazG gene, chpR gene, relA gene, barA gene, gud2 gene, gudT gene, mioC gene, syd gene, sdaB gene, exo gene, fucO gene, fucA gene, fucP gene, fucI gene, fucK gene, fucU gene, fucR gene, gcvA gene, nifS gene, mltA gene, amiC gene, argA gene, thyA gene, lgt gene, ptsP gene, mutH gene, tas gene, aas gene, galR gene, lysA gene, lysR gene, araE gene, kduD gene, kduI gene, lysS gene, prfB gene, recJ gene, dsbC gene, xerD gene, fldB gene, up14 gene, bglA gene, gcvP gene, gevH gene, gcvT gene, visC gene, ubiH gene, pepP gene, serA gene, rpiA gene, iciA gene, sbm gene, argK gene, fba gene, pgk gene, epd gene, tktA gene, speB gene, speA gene, metK gene, galP gene, sprT gene, endA gene, gshB gene, yqgF gene, ansB gene, mutY gene, mltC gene, nupG gene, speC gene, pitB gene, gsp gene, hybG gene, hybF gene, hybE gene, hybD gene, hybC gene, hybB gene, hybA gene, hoxK gene, exbD gene, exbB gene, metC gene, exsA gene, sufl gene, plsC gene, parC gene, parE gene, icc gene, tolC gene, ribB gene, glgS gene, rfaE gene, glnE gene, cca gene, bacA gene, folB gene, ttdA gene, ttdB gene, ygjD gene, rpsU gene, dnaG gene, rpoD gene, aer gene, ebgR gene, ebgA gene, ebgC gene, fadH gene, uxaA gene, uxaC gene, exuT gene, exuR gene, tdcE gene, tdcD gene, tdcC gene, tdcB gene, tdcA gene, tdcR gene, sohA gene, agaR gene, agaZ gene, agaV gene, agaW gene, agaA gene, agaS gene, agaY gene, agaB gene, agaC gene, agaD gene, agal gene, mtr gene, deaD gene, nlpI gene, pnp gene, rpsO gene, truB gene, rbfA gene, infB gene, nusA gene, argG gene, secG gene, mrsA gene, folP gene, ftsH gene, ftsJ gene, greA gene, dacB gene, yhbZ gene, rpmA gene, rplU gene, ispB gene, nlp gene, murA gene, yrbI gene, yrbK gene, rpoN gene, ptsN gene, ptsO gene, mtgA gene, arcB gene, gltB gene, nanT gene, npl gene, nanR gene, dcuD gene, sspB gene, sspA gene, rpsI gene, rpiM gene, hhoA gene, hhoB gene, mdh gene, argR gene, tldD gene, rmg gene, mreD gene, mreC gene, mreB gene, accB gene, accC gene, panF gene, prmA gene, fis gene, aroE gene, smg gene, smf gene, def gene, fmt gene, sun gene, trkA gene, mscL gene, zntR gene, rplQ gene, rpoA gene, rpsD gene, rpsK gene, rpsM gene, rpmJ gene, secY gene, rplO gene, rpmD gene, rpsE gene, rplR gene, rplF gene, rpsH gene, rpsN gene, rplE gene, rplX gene, rplN gene, rpsQ gene, rpmC gene, rplP gene, rpsC gene, rplV gene, rpsS gene, rplB gene, rplW gene, rplD gene, rplC gene, rpsJ gene, tufA gene, fusA gene, rpsG gene, rpsL gene, fkpA gene, slyX gene, slyD gene, kefB gene, prkB gene, crp gene, argD gene, pabA gene, fic gene, ppiA gene, nirB gene, nirD gene, nirC gene, cysG gene, php gene, trpS gene, gph gene, rpe gene, dam gene, damX gene, aroB gene, aroK gene, hofQ gene, mrcA gene, pckA gene, envZ gene, ompR gene, greB gene, feoA gene, feoB gene, bioH gene, gntT gene, malQ gene, malP gene, malT gene, rtcA gene, rtcB gene, rtcR gene, gipR gene, glpG gene, glpE gene, glpD gene, glgP gene, glgA gene, glgC gene, glgX gene, glgB gene, asd gene, gntU gene, gntU gene, gntK gene, gntR gene, ggt gene, ugpQ gene, ugpC gene, ugpE gene, ugpA gene, ugpB gene, livF gene, livG gene, livM gene, livH gene, livK gene, livJ gene, rpoH gene, ftsX gene, ftsE gene, ftsY gene, atzN gene, nikA gene, nikB gene, nikC gene, nikD gene, nikE gene, pitA gene, uspB gene, uspA gene, prlC gene, gor gene, arsR gene, arsB gene, arsC gene, slp gene, hdeB gene, hdeA gene, hdeD gene, gadA gene, treF gene, kdgK gene, dctA gene, dppF gene, dppD gene, dppC gene, dppB gene, dppA gene, tag gene, bisC gene, cspA gene, glyS gene, glyQ gene, xylB gene, xylA gene, xylF gene, xylG gene, xylH gene, xylR gene, bax gene, malS gene, avtA gene, lyx gene, sgbH gene, sgbU gene, sgbE gene, aldB gene, selB gene, selA gene, mtlA gene, mtlD gene, mtlR gene, lldP gene, lldR gene, lIdD gene, cysE gene, gpsA gene, secB gene, grxc gene, tdh gene, kbl gene, htrL gene, rfaD gene, rfaF gene, rfaC gene, rfaL gene, rfaK gene, rfaZ gene, rfaY gene, rfaJ gene, rfaI gene, rfaB gene, rfaS gene, rfaP gene, rfaG gene, rfaQ gene, kdtA gene, kdtB gene, mutM gene, rpmG gene, rpmB gene, radC gene, dfp gene, dut gene, ttk gene, pyrE gene, rph gene, dinD gene, gmk gene, rpoZ gene, spoT gene, spoU gene, recG gene, gitS gene, nlpA gene, uhpT gene, uhpC gene, uhpB gene, uhpA gene, ilvN gene, ilvB gene, ivbL gene, emrD gene, ibpB gene, ibpA gene, gyrB gene, recF gene, dnaN gene, dnaA gene, rpmH gene, rnpA gene, yidC gene, thdF gene, tnaL gene, tnaA gene, tnaB gene, bglB gene, bglF gene, bglG gene, phoU gene, pstB gene, pstA gene, pstC gene, pstS gene, glmS gene, glmU gene, atpC gene, uncD gene, atpG gene, atpA gene, atpH gene, atpF gene, atpE gene, atpB gene, atpI gene, gidB gene, gidA gene, mioC gene, asnC gene, pssR gene, ilvL gene, ilvG gene, ilvM gene, ilvE gene, ilvD gene, ilvA gene, ilvY gene, ilvC gene, ppiC gene, rep gene, gppA gene, rhlB gene, trxA gene, rhoL gene, rho gene, rfe gene, wzzE gene, nfrC gene, rffD gene, rffG gene, rffH gene, rffA gene, wzxE gene, rffT gene, wecG gene, aslB gene, aslA gene, hemY gene, hemX gene, hemD gene, hemC gene, cyaA gene, cyaY gene, dapF gene, xerC gene, uvrD gene, corA gene, radD gene, pldA gene, recQ gene, pldB gene, metR gene, metE gene, udp gene, ubiE gene, aarF gene, tatC gene, tatD gene, rfaH gene, ubiD gene, ubiB gene, fadA gene, fadB gene, pepQ gene, trkH gene, trkH gene, hemG gene, mobB gene, mobA gene, dsbA gene, polA gene, yihA gene, hemN gene, ntrC gene, ntrB gene, glnA gene, fdhE gene, fdoI gene, fdoH gene, fdoG gene, fdhD gene, sodA gene, kdgT gene, cpxA gene, cpxR gene, cpxP gene, pfkA gene, sbp gene, cdh gene, tpiA gene, fpr gene, glpX gene, glpK gene, glpF gene, menG gene, menA gene, hslU gene, hslV gene, ftsN gene, cytR gene, priA gene, rpmE gene, metJ gene, metB gene, metL gene, metF gene, katG gene, gldA gene, talC gene, ppc gene, argE gene, argC gene, argB gene, argH gene, oxyR gene, udhA gene, trmA gene, btuB gene, murI gene, murB gene, birA gene, coaA gene, tufB gene, secE gene, nusG gene, rplK gene, rplA gene, rplJ gene, rplL gene, rpoB gene, rpoC gene, htrC gene, thiH gene, thiG gene, thiS gene, thiF gene, thiE gene, thiC gene, rsd gene, hemE gene, nfi gene, hupA gene, hydH gene, hydG gene, purD gene, purH gene, metA gene, aceB gene, aceA gene, aceK gene, arp gene, iclR gene, metH gene, pepE gene, lysC gene, pgi gene, ubiC gene, ubiA gene, plsB gene, dgkA gene, lexA gene, dinF gene, qor gene, dnaB gene, alr gene, tyrB gene, napA gene, hobH gene, uvrA gene, ssb gene, soxS gene, soxR gene, acs gene, nrfA gene, nrfB gene, nrfC gene, nrfD gene, nrfE gene, nrfF gene, nrfG gene, gltP gene, fdhF gene, aisR gene, rpiB gene, proP gene, basS gene, basR gene, adiY gene, adi gene, melR gene, melA gene, melB gene, fumB gene, dcuB gene, dcuR gene, dcuS gene, lysU gene, cadA gene, cadB gene, cadC gene, cutA3 gene, cutA2 gene, cutA gene, dcuA gene, aspA gene, fxsA gene, groES gene, groEL gene, efp gene, ecnB gene, sugE gene, blc gene, ampC gene, frdD gene, frdC gene, frdB gene, frdA gene, genX gene, psd gene, yjeQ gene, yjeE gene, amiB gene, mutL gene, miaA gene, hfq gene, hflX gene, hflK gene, hflC gene, purA gene, vacB gene, sgaE gene, rpsF gene, priB gene, rpsR gene, rplI gene, fklB gene, cycA gene, cpdB gene, cysQ gene, msrA gene, chpS gene, chpB gene, ppa gene, fbp gene, mpl gene, pmbA gene, cybC gene, nrdG gene, nrdD gene, treC gene, treB gene, treR gene, mgtA gene, pyrI gene, pyrB gene, pyrBI gene, argl gene, valS gene, holC gene, xerB gene, idnR gene, idnT gene, idnO gene, idnD gene, idnK gene, fecE gene, fecD gene, fecC gene, fecB gene, fecA gene, fecR gene, fedI gene, dnaC gene, dnaT gene, bglJ gene, fhuF gene, rsmC gene, holD gene, rimI gene, prfC gene, osmY gene, deoC gene, deoA gene, deoB gene, deoD gene, lplA gene, smp gene, serB gene, radA gene, nadR gene, slt gene, trpR gene, gpmG gene, rob gene, creA gene, creB gene, creC gene, creD gene, arcA gene, lasT gene, thrL gene, and

[0235] acrE gene, argT gene, artI gene, artJ gene, artM gene, artP gene, artQ gene, bfr gene, chiA gene, chpA gene, dacC gene, deoR gene, dinG gene, elaA gene, elaB gene, elaC gene, elaD gene, envD gene, envR gene, fhuA gene, fhuB gene, fhuC gene, fhuD gene, folX gene, glnH gene, glnP gene, glnQ gene, gltJ gene, gltK gene, gltL gene, gspA gene, gspC gene, gspD gene, gspE gene, gspI gene, gspJ gene, gspK gene, gspL gene, hisJ gene, hisM gene, hisP gene, hisQ gene, hofD gene, hofF gene, hofG gene, hofH gene, ltaA gene, mdaA gene, mdaB gene, pinO gene, potF gene, potG gene, potH gene, potI gene, pshM gene, ptwB gene, ptwC gene, rhsB gene, rimK gene, xylU gene.

[0236] A specific example thereof is an E. coli mutant strain comprising chromosomal DNA that does not contain any gene selected from among genes excluding the above genes [1] and [2] among the genes shown in Table 1 or homologous genes thereof. {When the above genes [1] and [2] or homologous genes thereof comprise genes that wild-type E. coli strains do not originally contain (hereafter referred to as “NC genes”), however, the aforementioned E. coli mutant strain derived from the wild-type E. coli strain does not necessarily have the NC gene.} A more preferable example of the E. coli mutant strain of the present invention is an E. coli mutant strain comprising chromosomal DNA that does not contain DNA excluding the nucleotide sequences of the above genes [1] and [2] among the nucleotide sequences as shown in Table 1 and SEQ ID NO: 1 or DNA equivalent thereto. More preferred examples include the followings.

[0237] (2) The E. coli mutant strain according to (1) comprising chromosomal DNA that comprises DNA having the nucleotide sequences as shown in [1] to [69] below of the nucleotide sequence as shown in SEQ ID NO: 1 or DNA equivalent thereto.
[0238] [1] a nucleotide sequence of nucleotides 1 to 167064
[0239] [2] a nucleotide sequence of nucleotides 172980 to 243964
[0240] [3] a nucleotide sequence of nucleotides 253411 to 261963
[0241] [4] a nucleotide sequence of nucleotides 387532 to 389138
[0242] [5] a nucleotide sequence of nucleotides 403704 to 518029
[0243] [6] a nucleotide sequence of nucleotides 532712 to 535504
[0244] [7] a nucleotide sequence of nucleotides 550216 to 563940
[0245] [8] a nucleotide sequence of nucleotides 608119 to 675103
[0246] [9] a nucleotide sequence of nucleotides 689375 to 728820
[0247] [10] a nucleotide sequence of nucleotides 739594 to 832551
[0248] [11] a nucleotide sequence of nucleotides 848090 to 867637
[0249] [12] a nucleotide sequence of nucleotides 883474 to 890997
[0250] [13] a nucleotide sequence of nucleotides 909380 to 1048887
[0251] [14] a nucleotide sequence of nucleotides 1097020 to 1198105
[0252] [15] a nucleotide sequence of nucleotides 1225147 to 1630911
[0253] [16] a nucleotide sequence of nucleotides 1641039 to 1642631
[0254] [17] a nucleotide sequence of nucleotides 1650223 to 1964523
[0255] [18] a nucleotide sequence of nucleotides 1993076 to 1996661
[0256] [19] a nucleotide sequence of nucleotides 2028210 to 2033448
[0257] [20] a nucleotide sequence of nucleotides 2044377 to 2069148
[0258] [21] a nucleotide sequence of nucleotides 2081927 to 2104392
[0259] [22] a nucleotide sequence of nucleotides 2116065 to 2146263
[0260] [23] a nucleotide sequence of nucleotides 2187856 to 2200668
[0261] [24] a nucleotide sequence of nucleotides 2229851 to 2255894
[0262] [25] a nucleotide sequence of nucleotides 2263492 to 2270439
[0263] [26] a nucleotide sequence of nucleotides 2286589 to 2386261
[0264] [27] a nucleotide sequence of nucleotides 2395472 to 2423364
[0265] [28] a nucleotide sequence of nucleotides 2434099 to 2472851
[0266] [29] a nucleotide sequence of nucleotides 2482483 to 2505074
[0267] [30] a nucleotide sequence of nucleotides 2514558 to 2755676
[0268] [31] a nucleotide sequence of nucleotides 2789481 to 2795173
[0269] [32] a nucleotide sequence of nucleotides 2800891 to 2804307
[0270] [33] a nucleotide sequence of nucleotides 2810148 to 2825313
[0271] [34] a nucleotide sequence of nucleotides 2830263 to 2910273
[0272] [35] a nucleotide sequence of nucleotides 2910574 to 2985361
[0273] [36] a nucleotide sequence of nucleotides 3033129 to 3077084
[0274] [37] a nucleotide sequence of nucleotides 3078917 to 3110109
[0275] [38] a nucleotide sequence of nucleotides 3134342 to 3165627
[0276] [39] a nucleotide sequence of nucleotides 3172941 to 3360736
[0277] [40] a nucleotide sequence of nucleotides 3370548 to 3411159
[0278] [41] a nucleotide sequence of nucleotides 3420879 to 3453020
[0279] [42] a nucleotide sequence of nucleotides 3469367 to 3618575
[0280] [43] a nucleotide sequence of nucleotides 3636917 to 3854661
[0281] [44] a nucleotide sequence of nucleotides 3865832 to 3867101
[0282] [45] a nucleotide sequence of nucleotides 3877011 to 3926658
[0283] [46] a nucleotide sequence of nucleotides 3938879 to 4059897
[0284] [47] a nucleotide sequence of nucleotides 4079660 to 4086450
[0285] [48] a nucleotide sequence of nucleotides 4099983 to 4139231
[0286] [49] a nucleotide sequence of nucleotides 4149710 to 4235358
[0287] [50] a nucleotide sequence of nucleotides 4251736 to 4298976
[0288] [51] a nucleotide sequence of nucleotides 4311512 to 4313317
[0289] [52] a nucleotide sequence of nucleotides 4329722 to 4409532
[0290] [53] a nucleotide sequence of nucleotides 4423152 to 4496201
[0291] [54] a nucleotide sequence of nucleotides 4509535 to 4517875
[0292] [55] a nucleotide sequence of nucleotides 4599638 to 4641433
[0293] [56] a nucleotide sequence of nucleotides 167065 to 172979
[0294] [57] a nucleotide sequence of nucleotides 675104 to 689374
[0295] [58] a nucleotide sequence of nucleotides 832552 to 848089
[0296] [59] a nucleotide sequence of nucleotides 867638 to 883473
[0297] [60] a nucleotide sequence of nucleotides 890998 to 909379
[0298] [61] a nucleotide sequence of nucleotides 2386262 to 2395471
[0299] [62] a nucleotide sequence of nucleotides 2423365 to 2434098
[0300] [63] a nucleotide sequence of nucleotides 2472852 to 2482482
[0301] [64] a nucleotide sequence of nucleotides 2505075 to 2514557
[0302] [65] a nucleotide sequence of nucleotides 2910274 to 2910573
[0303] [66] a nucleotide sequence of nucleotides 3165628 to 3172940
[0304] [67] a nucleotide sequence of nucleotides 3411160 to 3420878
[0305] [68] a nucleotide sequence of nucleotides 3453021 to 3469366
[0306] [69] a nucleotide sequence of nucleotides 3618576 to 3636916
[0307] (3) The E. coli mutant strain according to (1) or (2) comprising chromosomal DNA that does not comprise yafJ gene, yafK gene, yafQ gene, dinJ gene, yafL gene, yafM gene, fhiA gene, lafU gene, dinP gene, yafN gene, yafO gene, yafP gene, JW0225 gene, prfH gene, ykfI gene, yafW gene, yeeT gene, ykfG gene, yafX gene, ykfF gene, ykfB gene, yafY gene, ypjK gene, yafZ gene, ykfA gene, perR gene, JW0245 gene, JW0246 gene, JW0247 gene, ykfC gene, JW0249 gene, is5B gene, yi51 gene, mmuP gene, mmuM gene, afuC gene, JW0255 gene, insB gene, insA gene, JW0258 gene, yagB gene, yagA gene, yagE gene, yagF gene, yagG gene, yagH gene, yagI gene, argF gene, yfjI gene, yagJ gene, yagK gene, yagL gene, yagM gene, yagN gene, intF gene, yagP gene, yagQ gene, yagR gene, yagS gene, yagT gene, yagU gene, ykgJ gene, yagV gene, yagW gene, yagX gene, yagY gene, yagZ gene, ykgK gene, ykgL gene, ykgM gene, eaeH gene, JW0292 gene, JW0293 gene, ykgA gene, ykgB gene, ykgI gene, merA gene, ykgD gene, ykgE gene, ykgF gene, ykgG gene, ykgH gene, betA gene, betB gene, betI gene, betT gene, yahA gene, yahB gene, yahC gene, yahD gene, yahE gene, yahF gene, yahG gene, yahH gene, arcM gene, yahJ gene, yahK gene, yahL gene, yahM gene, yahN gene, yahO gene, prpR gene, bcpA gene, prpC gene, prpD gene, prpE gene, codB gene, codA gene, cynR gene, cynT gene, cynS gene, cynX gene, lacA gene, lacY gene, lacZ gene, lacd gene, mhpR gene, mhpA gene, mhpB gene, mhpC gene, mhpD gene, mhpF gene, mhpE gene, mhpT gene, yaiL gene, yaiM gene, adhC gene, yaiN gene, yaiO gene, JW0350 gene, yi2A gene, yi22 gene, yi24 gene, yi23 gene, yaiP gene, yaiS gene, tauA gene, tauB gene, tauC gene, ssiD gene, yaiT gene, JW0363 gene, JW0364 gene, yaiU gene, yaiV gene, ampH gene, sbmA gene, yaiW gene, yaiY gene, yaiZ gene, ddlA gene, yaiB gene, phoA gene, psiF gene, yaiC gene, ybbO gene, tesA gene, ybbA gene, ybbP gene, rhsD gene, ybbC gene, rhsE gene, ybbD gene, JW0490 gene, ybbB gene, ybbS gene, ybbT gene, ybbU gene, ybbQ gene, ybbV gene, allP gene, allA gene, ybbY gene, ybbZ gene, ylbA gene, alIC gene, ylbC gene, fdrA gene, ylbE gene, ylbF gene, arcC gene, intD gene, EXO_LAMBD gene, VRPP_LAMBD gene, JW0528 gene, JW0529 gene, VREN_LAMBD gene, emrE gene, ybcK gene, ybcL gene, ybcM gene, ybcN gene, ninE gene, ybcO gene, rus gene, ybcQ gene, JW0539.5 gene, nmpC gene, vlyS gene, ybcS gene, ybcT gene, vboR gene, ybcV gene, ybcW gene, nohB gene, ybcX gene, ybcY gene, JW0552 gene, appY gene, ompT gene, envY gene, ybcH gene, nfrA gene, nfrB gene, cusS gene, cusR gene, cusC gene, ylcC gene, cusB gene, cusA gene, pheP gene, ybdG gene, nfnB gene, ybdF gene, ybdJ gene, ybdK gene, hokE gene, yi81 gene, yi82 gene, ymcC gene, ymcD gene, cspH gene, cspG gene, sfa gene, yccL gene, yccM gene, torS gene, torT gene, torR gene, torC gene, torA gene, torD gene, yccD gene, cbpA gene, yccE gene, agp gene, yccJ gene, wrbA gene, yciG gene, ycdG gene, JW0992 gene, JW0993 gene, JW0994 gene, ycdK gene, JW0996 gene, JW0997 gene, ycdC gene, putA gene, yzpU gene, putP gene, JW1002 gene, ycdO gene, ycdB gene, phoH gene, ycdP gene, ycdQ gene, ycdR gene, ycdS gene, ycdT gene, JW1012 gene, JW1013 gene, JW1014 gene, ycdU gene, ymfD gene, ymfE gene, lit gene, intE gene, VXIS_BPP21 gene, ymfH gene, ymfI gene, ymfJ gene, RPC2_BPP22 gene, JW1132 gene, ymfL gene, ymfM gene, ymfN gene, ymfR gene, ymfO gene, JW1138 gene, JW1139 gene, ycfK gene, ymfS gene, ycfA gene, ycfE gene, pin gene, mcrA gene, JW1146 gene, ycgW gene, ycgX gene, ycgE gene, JW1150 gene, ycgZ gene, ymgA gene, JW1153 gene, ymgC gene, yahA gene, JW1156 gene, JW1157 gene, aidA gene, ymgD gene, JW1160 gene, JW1161 gene, JW1162 gene, ydfH gene, ydfZ gene, ydfI gene, shiA gene, JW1537 gene, tnpR gene, ydfM gene, Y314_LAMBD gene, nohA gene, ydfO gene, yccL gene, cspI gene, ydfR gene, vlyS gene, cspB gene, cspF gene, regQ_LAMBD gene, JW1552 gene, rem gene, hokD gene, relE gene, relB gene, ydfV gene, fixA gene, ydfW gene, ydfX gene, dicC gene, sdaC gene, yqeH gene, yqeI gene, yqeJ gene, yqeK gene, ygeF gene, ygeG gene, ygeH gene, ygeI gene, JW2822 gene, ygeK gene, JW2824 gene, JW2825 gene, JW2830 gene, ygeP gene, JW2832 gene, nlpD gene, yagR gene, ygeT gene, JW2836 gene, ygeV gene, ygew gene, dpaL gene, ygeY gene, ygeZ gene, arcL gene, yqeB gene, JW2844 gene, ygfJ gene, gltD gene, JW2847 gene, ygfM gene, yagR gene, ygfO gene, ygfP gene, ygfQ gene, ygfR gene, ygfS gene, ygfT gene, pbuX gene, idi gene, epsM gene, exeL gene, exeC gene, JW2938 gene, JW2939 gene, JW2940 gene, JW2941 gene, yghK gene, glcB gene, glcG gene, glcF gene, glcD gene, glcC gene, JW2948 gene, yghQ gene, yghR gene, yghS gene, yghT gene, yihL gene, yihM gene, yihN gene, yshA gene, yihO gene, yihP gene, yihQ gene, yihR gene, yihS gene, yihT gene, yihU gene, yihV gene, yihW gene, yihX gene, rbn gene, yihZ gene, yiiD gene, yiiE gene, yiiF gene, yiiG gene, frvR gene, frvX gene, frvB gene, frvA gene, yiiL gene, rhaD gene, rhaA gene, rhaB gene, rhaS gene, rhaR gene, rhaT gene, ptsA gene, JW3920 gene, frwC gene, frwB gene, pflD gene, pflC gene, frwD gene, yijO gene, yijP gene, JW3986 gene, yjbF gene, yjbG gene, yjbH gene, JW3989.5 gene, yjbA gene, xylE gene, maiG gene, malF gene, malE gene, malK gene, lamB gene, malM gene, yjbI gene, yjcP gene, yjcQ gene, yjcR gene, yjcS gene, alsK gene, alsE gene, alsC gene, alsA gene, alsB gene, phnQ gene, phnP gene, phnO gene, phnN gene, phnM gene, phnL gene, phnK gene, phnJ gene, phnI gene, phnH gene, phnG gene, phnF gene, phnE gene, phnD gene, phnC gene, phnB gene, phnA gene, yjdA gene and yjcZ gene, or homologous gene thereof.
[0308] (4) The E. coli mutant strain according to any one of (1) to (3) comprising chromosomal DNA that does not comprise DNA having the nucleotide sequences as shown in [1] to [18] below of the nucleotide sequence as shown in SEQ ID NO: 1 or DNA equivalent thereto.
[0309] [1] a nucleotide sequence of nucleotides 243965 to 253410
[0310] [2] a nucleotide sequence of nucleotides 261964 to 387531
[0311] [3] a nucleotide sequence of nucleotides 389139 to 403703
[0312] [4] a nucleotide sequence of nucleotides 518030 to 532711
[0313] [5] a nucleotide sequence of nucleotides 535505 to 550215
[0314] [6] a nucleotide sequence of nucleotides 563941 to 608118
[0315] [7] a nucleotide sequence of nucleotides 1048888 to 1097019
[0316] [8] a nucleotide sequence of nucleotides 1198106 to 1225146
[0317] [9] a nucleotide sequence of nucleotides 1630912 to 1641038
[0318] [10] a nucleotide sequence of nucleotides 1642632 to 1650222
[0319] [11] a nucleotide sequence of nucleotides 2985362 to 3033128
[0320] [12] a nucleotide sequence of nucleotides 3110110 to 3134341
[0321] [13] a nucleotide sequence of nucleotides 4059898 to 4079659
[0322] [14] a nucleotide sequence of nucleotides 4086451 to 4099982
[0323] [15] a nucleotide sequence of nucleotides 4139232 to 4149709
[0324] [16] a nucleotide sequence of nucleotides 4235359 to 4251735
[0325] [17] a nucleotide sequence of nucleotides 4298977 to 4311511
[0326] [18] a nucleotide sequence of nucleotides 4313318 to 4329721
[0327] (5) The E. coli mutant strain according to any one of (1) to (4) comprising chromosomal DNA that does not comprise yidF gene, yidG gene, yidH gene, yidI gene, yidJ gene, yidK gene, yidL gene, JW3657 gene, glvG gene, glvB gene, glvC gene, yidP gene, yidE gene, yidQ gene, yidR gene, yidS gene, dgoT gene, dgoA gene, dgoK gene, dgoR gene, yidW gene, yidX gene, yidA gene, yidB gene, asnA gene, yieM gene, JW3724 gene, yieN gene, kup gene, rbsD gene, rbsA gene, rbsC gene, rbsB gene, rbsK gene, rbsR gene and yieO gene, or homologous gene thereof.
[0328] (6) The E. coli mutant strain according to any one of (1) to (5) comprising chromosomal DNA that does not comprise DNA having the nucleotide sequences as shown in [1] to [3] below of the nucleotide sequence as shown in SEQ ID NO: 1 or DNA equivalent thereto.
[0329] [1] a nucleotide sequence of nucleotides3854662 to 3865831
[0330] [2] a nucleotide sequence of nucleotides3 867102 to 3877010
[0331] [3] a nucleotide sequence of nucleotides 3926659 to 3938878
[0332] (7) The E. coli mutant strain according to any one of (1) to (6) comprising chromosomal DNA that does not comprise yecT gene, flhE gene, flhA gene, flhB gene, cheZ gene, cheY gene, cheB gene, cheR gene, tap gene, tar gene, cheW gene, cheA gene, motB gene, motA gene, fihC gene, flhD gene, JW1882 gene, JW1883 gene, yecG gene, otsA gene, otsB gene, araH gene, araG gene, araF gene, yecI gene, yecJ gene, JW1892 gene, ftn gene, yecH gene, tyrP gene, uvrC gene, uvrY gene, yecF gene, sdiA gene, yecC gene, yecS gene, yedO gene, fliY gene, fliZ gene, fliA gene, fliC gene, fliD gene, fliS gene, fliT gene, amyA gene, yedD gene, yedE gene, yedF gene, yedK gene, yedL gene, yedN gene, yedM gene, fliE gene, fliF gene, fliG gene, fliH gene, fliI gene, fliJ gene, fliK gene, fliL gene, fliM gene, fliN gene, fliO gene, fliP gene, fliQ gene, fliR gene, rcsA gene, dsrB gene, JW1937 gene, yedA gene, vsr gene, dcm gene, yedJ gene, JW1946 gene, ompC gene, JW1948 gene, yedS gene, yedU gene, yedV gene, copR gene, yedX gene, JW1954 gene, JW1955 gene, JW1956 gene, JW1974 gene, JW1979 gene, JW1980 gene, yeeP gene, flu gene, JW1983 gene, yeeS gene, yeeU gene, yeeV gene, yeeW gene, yefJ gene, JW2013 gene, yefJ gene, yefI gene, wbbJ gene, yefG gene, rfc gene, glf gene, rfbX gene, rfbC gene, rfbA gene, rfbD gene and rfbB gene, or homologous gene thereof.
[0333] (8) The E. coli mutant strain according to any one of (1) to (7) comprising chromosomal DNA that does not comprise DNA having the nucleotide sequences as shown in [1] to [5] below of the nucleotide sequence as shown in SEQ ID NO: 1 or DNA equivalent thereto.
[0334] [1] a nucleotide sequence of nucleotides 964524 to 1993075
[0335] [2] a nucleotide sequence of nucleotides 1996662 to 2028209
[0336] [3] a nucleotide sequence of nucleotides 2033449 to 2044376
[0337] [4] a nucleotide sequence of nucleotides 2069149t to 2081926
[0338] [5] a nucleotide sequence of nucleotides 2104393 to 2116064
[0339] (9) The E. coli mutant strain according to any one of (1) to (8) comprising chromosomal DNA that does not comprise intA gene, yfjH gene, alpA gene, yfjI gene, JW2606 gene, yfjJ gene, yfjK gene, yfjL gene, yfjM gene, yfjN gene, yfjO gene, yfjP gene, yfjQ gene, yfjR gene, ypjK gene, yfjS gene, yfjT gene, yfjU gene, yfjV gene, JW2622 gene, yfjW gene, JW2623.5 gene, yfjX gene, yfjY gene, yfjZ gene, ypjF gene, ypjA gene, JW2629 gene, JW2630 gene, JW2631 gene, JW2632 gene, JW2633 gene, JW2634 gene, ygaE gene, yzzM gene, yqaE gene, JW2642 gene, ygaP gene, stpA gene, JW2645 gene, ygaC gene, ygaM gene, nrdH gene, nrdI gene, nrdE gene, proV gene, proW gene, proX gene, JW2655 gene, JW2656 gene, ygaZ gene, ygaH gene, srlA gene, srlB gene, srlD gene, gutM gene, srlR gene and gutQ gene, or homologous gene thereof.
[0340] (10) The E. coli mutant strain according to any one of (1) to (9) comprising chromosomal DNA that does not comprise DNA having the nucleotide sequences as shown in [1] to [4] below of the nucleotide sequence as shown in SEQ ID NO: 1 or DNA equivalent thereto.
[0341] [1] a nucleotide sequence of nucleotides 2755677 to 2789480
[0342] [2] a nucleotide sequence of nucleotides 2795174 to 2800890
[0343] [3] a nucleotide sequence of nucleotides 2804308 to 2810147
[0344] [4] a nucleotide sequence of nucleotides 2825314 to 2830262
[0345] (11) The E. coli mutant strain according to any one of (1) to (10) comprising chromosomal DNA that does not comprise gltF gene, yhcA gene, yhcD gene, yhcE gene, yhcF gene, yhcG gene, yhcH gene, nanK gene and nanE gene, or homologous gene thereof.
[0346] (12) The E. coli mutant strain according to any one of (1) to (11) comprising chromosomal DNA that does not comprise DNA having a nucleotide sequence comprising nucleotides 3360737 to 3370547 of the nucleotide sequence as shown in SEQ ID NO: 1 or DNA equivalent thereto.
[0347] (13) The E. coli mutant strain according to any one of (1) to (12) comprising chromosomal DNA that does not comprise yegE gene, alka gene, yegD gene, JW2055 gene, JW2056 gene, JW2057 gene, JW2058 gene, yegM gene, yegN gene, yegO gene, yegB gene, baeS gene, baeR gene, JW2065 gene, yegQ gene, ogrK gene, JW2068 gene, JW2069 gene, yegS gene, gatR gene, JW2072 gene, JW2073 gene, gatR gene, gatD gene, gatC gene, gatB gene, gatA gene, gatZ gene, gatY gene, fbaB gene, xegT gene, yegU gene, yegV gene, yegW gene, yegX gene, molR gene, yehI gene, yehK gene, yehL gene, yehO gene, yehP gene, yehQ gene, yehR gene, yehS gene, yehT gene, yehU gene, yehV gene, yehW gene, yehX gene, yehY gene, yehZ gene, bglX gene, dld gene, pbpG gene, yohC gene, yeiQ gene, yeiR gene, yeiU gene, spr gene, rtn gene, yejA gene, yejB gene, yejE gene, yejF gene, yejG gene, bcr gene, rsuA gene, yejH gene, yeiI gene, yeiJ gene, yeiK gene, yeiL gene, yeiM gene, yeiN gene and yeiC gene, or homologous gene thereof.
[0348] (14) The E. coli mutant strain according to any one of (1) to (13) comprising chromosomal DNA that does not comprise DNA having the nucleotide sequences as shown in [1] to [4] below of the nucleotide sequence as shown in SEQ ID NO: 1 or DNA equivalent thereto.
[0349] [1] a nucleotide sequence of nucleotides 2146264 to 2187855
[0350] [2] a nucleotide sequence of nucleotides 2200669 to 2229850
[0351] [3] a nucleotide sequence of nucleotides 2270440 to 2286588
[0352] [4] a nucleotide sequence of nucleotides 2255895 to 2263491
[0353] (15) The E. coli mutant strain according to any one of (1) to (14) comprising chromosomal DNA that does not comprise cmtA gene, cmtB gene, or homologous gene thereof.
[0354] (16) The E. coli mutant strain according to any one of (1) to (15) comprising chromosomal DNA that does not comprise DNA having a nucleotide sequence comprising nucleotides 3077085 to 3078916 of the nucleotide sequence as shown in SEQ ID NO: 1 or DNA equivalent thereto.
[0355] (17) The E. coli mutant strain according to any one of (1) to (16) comprising chromosomal DNA that does not comprise intB gene, JW4228 gene, yjgW gene, yjgX gene, yjgY gene, yjgZ gene, yi41 gene, yi42 gene, yjhB gene, yjhC gene, yjhD gene, yjhE gene, yi91 gene, JW4244 gene, JW4245 gene, JW4246 gene, yjhU gene, yjhF gene, yjhG gene, yjhH gene, yjhI gene, sgcR gene, sgcE gene, sgcA gene, sgcQ gene, sgcC gene, JW4266.5 gene, sgcX gene, yjhP gene, yjhQ gene, JW4269.5 gene, JW4270 gene, JW4270.5 gene, yjhR gene, yjhS gene, yjhT gene, yjhA gene, fimB gene, fimE gene, fimA gene, fimI gene, fimC gene, fimD gene, fimF gene, fimG gene, fimH gene, gntP gene, uxuA gene, uxuB gene, uxuR gene, yjiC gene, yjiD gene, yjiE gene, iadA gene, yjiG gene, yjiH gene, yjiI gene, yjiJ gene, yjiK gene, JW4296.5 gene, yjiL gene, yjiM gene, yjiN gene, yjiO gene, yjiP gene, yjiQ gene, yjiR gene, yjiS gene, yjiT gene, yjiV gene, mcrD gene, mcrC gene, mcrB gene, yjiW gene, hsdS gene, hsdM gene, hsdR gene, mrr gene, yjiA gene, yjiX gene, yjiY gene, tsr gene, yjjL gene, JW4320 gene, yjjM gene, yjjN gene, mdoB gene and yjjA gene, or homologous gene thereof.
[0356] (18) The E. coli mutant strain according to any one of (1) to (17) comprising chromosomal DNA that does not comprise DNA having the nucleotide sequences as shown in [1] and/or [2] below of the nucleotide sequence as shown in SEQ ID NO: 1 or DNA equivalent thereto.
[0357] [1] a nucleotide sequence of nucleotides 4496202 to 4509534
[0358] [2] a nucleotide sequence of nucleotides 4517876 to 4599637
[0359] (19) The E. coli mutant strain according to any one of (1) to (18) comprising chromosomal DNA that does not comprise kdpF gene, ybfA gene, rhsC gene, JW0690 gene, ybfB gene, rhsA gene, ybfC gene, ybfD gene, ybfL gene, ybfD gene and ybgA gene, or homologous gene thereof.
[0360] (20) The E. coli mutant strain according to any one of (1) to (19) comprising chromosomal DNA that does not comprise DNA having a nucleotide sequence comprising nucleotides 728821 to 739593 of the nucleotide sequence as shown in SEQ ID NO: 1 or DNA equivalent thereto.
[0361] (21) The E. coli mutant strain according to any one of (1) to (20) comprising chromosomal DNA that does not comprise yjfl gene, yjfJ gene, yjfK gene, yjfL gene, yjfM gene, yjfC gene, aidB gene, yjfN gene, yjfO gene, yjfP gene, yjfQ gene, yjfR gene, sgaT gene, sgaB gene, sgaA gene, sgaH gene and sgaU gene, or homologous gene thereof.
[0362] (22) The E. coli mutant strain according to any one of (1) to (21) comprising chromosomal DNA that does not comprise DNA having a nucleotide sequence comprising nucleotides 4409533 to 4423151 of the nucleotide sequence as shown in SEQ ID NO: 1 or DNA equivalent thereto.

[0363] Further, the mutant of the present invention includes the followings.
[0364] (23) An E. coli mutant strain comprising the gene (1) [1] above, spr gene, bcr gene, rsuA gene, or homologous gene thereof and comprising chromosomal DNA that is at least 933 kbp shorter than that of a wild-type E. coli strain, which may be the mutant strain comprising chromosomal DNA that does not comprise any gene excluding the above genes that are present on chromosomal DNA of a wild-type E. coli strain or homologous genes thereof, preferably the mutant strain comprising chromosomal DNA that does not contain gene other than genes contained in Δ43 region of Table 1; more preferably the mutant strain comprising chromosomal DNA that does not contain DNA other than DNA comprising nucleotide sequence corresponding to Δ43 region of Table 1 or DNA equivalent thereto. Further more preferably, the mutant of the present invention includes the followings.
[0365] (24) The E. coli mutant strain according to (23) comprising chromosomal DNA that comprises DNA having the nucleotide sequences as shown in [1] to [55] of (2) above and DNA having a nucleotide sequence comprising nucleotides 2270440 to 2286588 of the nucleotide sequence as shown in SEQ ID NO: 1 or DNA equivalent thereto.
[0366] (25) The E. coli mutant strain according to (23) or (24) comprising chromosomal DNA that does not comprise yafJ gene, yafK gene, yafQ gene, dinJ gene, yafL gene, yafM gene, fhiA gene, lafU gene, dinP gene, yafN gene, yafO gene, yafP gene, JW0225 gene, prfH gene, ykfI gene, yafW gene, yeeT gene, ykfG gene, yafX gene, ykfF gene, ykfB gene, yafY gene, ypjK gene, yafZ gene, ykfA gene, perR gene, JW0245 gene, JW0246 gene, JW0247 gene, ykfC gene, JW0249 gene, is51 gene, yi51 gene, mmuP gene, mmuM gene, afuC gene, JW0255 gene, insB gene, insA gene, JW0258 gene, yagB gene, yagA gene, yagE gene, yagF gene, yagG gene, yagH gene, yagI gene, argF gene, yfjI gene, yagJ gene, yagK gene, yagL gene, yagM gene, yagN gene, intF gene, yagP gene, yagQ gene, yagR gene, yagS gene, yagT gene, yagU gene, ykgJ gene, yagV gene, yagW gene, yagX gene, yagY gene, yagZ gene, ykgK gene, ykgL gene, ykgM gene, eaeH gene, JW0292 gene, JW0293 gene, ykgA gene, ykgB gene, ykgI gene, merA gene, ykgD gene, ykgE gene, ykgF gene, ykgG gene, ykgH gene, betA gene, betB gene, betI gene, betT gene, yahA gene, yahB gene, yahC gene, yahD gene, yahE gene, yahF gene, yahG gene, yahH gene, arcM gene, yahJ gene, yahK gene, yahL gene, yahM gene, yahN gene, yahO gene, prpR gene, bcpA gene, prpC gene, prpD gene, prpE gene, codB gene, codA gene, cynR gene, cynT gene, cynS gene, cynX gene, lacA gene, lacY gene, lacZ gene, lacI gene, mhpR gene, mhpA gene, mhpB gene, mhpC gene, mhpD gene, mhpF gene, mhpE gene, mhpT gene, yaiL gene, yaiM gene, adhC gene, yaiN gene, yaiO gene, JW0350 gene, yi2A gene, yi22 gene, yi24 gene, yi23 gene, yaiP gene, yaiS gene, tauA gene, tauB gene, tauC gene, ssiD gene, yaiT gene, JW0363 gene, JW0364 gene, yaiU gene, yaiV gene, ampH gene, sbmA gene, yaiW gene, yaiY gene, yaiZ gene, ddlA gene, yaiB gene, phoA gene, psiF gene, yaiC gene, ybbO gene, tesA gene, ybbA gene, ybbP gene, rhsD gene, ybbC gene, rhsE gene, ybbD gene, JW0490 gene, ybbB gene, ybbS gene, ybbT gene, ybbU gene, ybbQ gene, ybbV gene, allP gene, allA gene, ybbY gene, ybbZ gene, ylbA gene, allC gene, ylbC gene, fdrA gene, ylbE gene, ylbE gene, ylbE gene, ylbF gene, arcC gene, intD gene, EXO_LAMBD gene, VRPP_LAMBD gene, JW0528 gene, JW0529 gene, VREN_LAMBD gene, emrE gene, ybcK gene, ybcL gene, ybcM gene, ybcN gene, ninE gene, ybcO gene, rus gene, ybcQ gene, JW0539.5 gene, nmpC gene, vlyS gene, ybcS gene, ybcT gene, vboR gene, ybcV gene, ybcW gene, nohB gene, ybcX gene, ybcY gene, JW0552 gene, appY gene, ompT gene, envY gene, ybcH gene, nfrA gene, nfrB gene, cusS gene, cusR gene, cusC gene, ylcC gene, cusB gene, cusA gene, pheP gene, ybdG gene, nfnB gene, ybdF gene, ybdJ gene, ybdK gene, hokE gene, yi81 gene, yi82 gene, ymcC gene, ymcD gene, cspH gene, cspG gene, sfa gene, yccL gene, yccM gene, torS gene, torT gene, torR gene, torC gene, torA gene, torD gene, yccD gene, cbpA gene, yccE gene, agp gene, yccJ gene, wrbA gene, yciG gene, ycdG gene, JW0992 gene, JW0993 gene, JW0994 gene, ycdK gene, JW0996 gene, JW0997 gene, ycdC gene, putA gene, yzpU gene, putP gene, JW1002 gene, ycdO gene, ycdB gene, phoH gene, ycdP gene, ycdQ gene, ycdR gene, ycdR gene, ycdS gene, ycdT gene, JW1012 gene, JW1013 gene, JW1014 gene, ycdU gene, ymfD gene, ymfE gene, lit gene, intE gene, VXIS_BPP21 gene, ymfH gene, ymfI gene, ymfJ gene, RPC2_BPP22 gene, JW1132 gene, ymfL gene, ymfM gene, ymfN gene, ymfR gene, ymfO gene, JW1138 gene, JW1139 gene, ycfK gene, ymfS gene, ycfA gene, ycfE gene, pin gene, mcrA gene, JW1146 gene, ycgW gene, ycgX gene, ycgE gene, JW1150 gene, ycgZ gene, ymgA gene, JW1153 gene, ymgC gene, yahA gene, JW1156 gene, JW1157 gene, aidA gene, ymgD gene, JW1160 gene, JW1161 gene, JW1162 gene, ydfH gene, ydfZ gene, ydfI gene, shiA gene, JW1537 gene, tnpR gene, ydfM gene, Y314_LAMBD gene, nohA gene, ydfO gene, yccL gene, cspI gene, ydfR gene, vlyS gene, cspB gene, cspF gene, regQ_LAMBD gene, JW1552 gene, rem gene, hokD gene, relE gene, relB gene, ydfV gene, flxA gene, ydfW gene, ydfX gene, dicC gene, sdaC gene, yqeH gene, yqeI gene, yqeJ gene, yqeK gene, ygeF gene, ygeG gene, ygeH gene, ygeI gene, JW2822 gene, ygeK gene, JW2824 gene, JW2825 gene, JW2830 gene, ygeP gene, JW2832 gene, nlpD gene, yagR gene, ygeT gene, JW2836 gene, ygeV gene, ygeW gene, dpaL gene, ygeY gene, ygeZ gene, areL gene, yqeB gene, JW2844 gene, ygfJ gene, gltD gene, JW2847 gene, ygfM gene, yagR gene, ygfO gene, ygfP gene, ygfQ gene, ygfR gene, ygfS gene, ygfT gene, pbuX gene, idi gene, epsM gene, exeL gene, exeC gene, JW2938 gene, JW2939 gene, JW2940 gene, JW2941 gene, yghK gene, glcB gene, glcG gene, glcF gene, glcD gene, glcC gene, JW2948 gene, yghQ gene, yghR gene, yghS gene, yghT gene, yihL gene, yihM gene, yihN gene, yshA gene, yihO gene, yihP gene, yihQ gene, yihR gene, yihS gene, yihT gene, yihU gene, yihV gene, yihW gene, yihX gene, rbn gene, yihZ gene, yiiD gene, yiiE gene, yiiF gene, yiiG gene, frvR gene, frvX gene, frvB gene, frvA gene, yiiL gene, rhaD gene, rhaA gene, rhaB gene, rhaS gene, rhaR gene, rhaT gene, ptsA gene, JW3920 gene, frwC gene, frwB gene, pflD gene, pflC gene, frwD gene, yijO gene, yijP gene, JW3986 gene, yjbF gene, yjbG gene, yjbH gene, JW3989.5 gene, yjbA gene, xylE gene, malG gene, malF gene, malE gene, malK gene, lamB gene, malM gene, yjbI gene, yjcP gene, yjcQ gene, yjcR gene, yjcS gene, alsK gene, alsE gene, alsC gene, alsA gene, alsB gene, phnQ gene, phnP gene, phnO gene, phnN gene, phnM gene, phnL gene, phnK gene, phnJ gene, phnI gene, phnH gene, phnG gene, phnF gene, phnE gene, phnD gene, phnC gene, phnB gene, phnA gene, yjdA gene, yjcZ gene, yidF gene, yidG gene, yidH gene, yidI gene, yidJ gene, yidK gene, yidL gene, JW3657 gene, glvG gene, glvB gene, glvC gene, yidP gene, yidE gene, yidQ gene, yidR gene, yidS gene, dgoT gene, dgoA gene, dgoK gene, dgoR gene, yidW gene, yidX gene, yidA gene, yidB gene, asnA gene, yieM gene, JW3724 gene, yieN gene, kup gene, rbsD gene, rbsA gene, rbsC gene, rbsB gene, rbsK gene, rbsR gene, yieO gene, yecT gene, flhE gene, flhA gene, flhB gene, cheZ gene, cheY gene, cheB gene, cheR gene, tap gene, tar gene, cheW gene, cheA gene, motB gene, motA gene, flhC gene, flhD gene, JW1882 gene, JW1883 gene, yecG gene, otsA gene, otsB gene, araH gene, araG gene, araF gene, yecI gene, yecJ gene, JW1892 gene, ftn gene, yecH gene, tyrP gene, uvrC gene, uvrY gene, yecF gene, sdiA gene, yecC gene, yecS gene, yedO gene, fliY gene, fliZ gene, fliA gene, fliC gene, fliD gene, fliS gene, fliT gene, amyA gene, yedD gene, yedE gene, yedF gene, yedK gene, yedL gene, yedN gene, yedM gene, fliE gene, fliF gene, fliG gene, fliH gene, fliI gene, fliJ gene, fliK gene, fliL gene, fliM gene, fliN gene, fliO gene, flip gene, fliQ gene, fliR gene, rcsA gene, dsrB gene, JW1937 gene, yedA gene, vsr gene, dcm gene, yedJ gene, JW1946 gene, ompC gene, JW1948 gene, yedS gene, yedU gene, yedV gene, copR gene, yedX gene, JW1954 gene, JW1955 gene, JW1956 gene, JW1974 gene, JW1979 gene, JW1980 gene, yeeP gene, flu gene, JW1983 gene, yeeS gene, yeeT gene, yeeU gene, yeeV gene, yeeW gene, yefJ gene, JW2013 gene, yefJ gene, yefI gene, wbbJ gene, yefG gene, rfc gene, glf gene, rfbX gene, rfbC gene, rfbA gene, rfbD gene, rfbB gene, intA gene, yfjH gene, alpA gene, yfjI gene, JW2606 gene, yfjJ gene, yfjK gene, yfjL gene, yfjM gene, yfjN gene, yfjO gene, yfjP gene, yfjQ gene, yfjR gene, ypjK gene, yfjS gene, yfjT gene, yfjU gene, yfjV gene, JW2622 gene, yfjW gene, JW2623.5 gene, yfjX gene, yfjY gene, yfjZ gene, ypjF gene, ypjA gene, JW2629 gene, JW2630 gene, JW2631 gene, JW2632 gene, JW2633 gene, JW2634 gene, ygaE gene, yzzM gene, yqaE gene, JW2642 gene, ygaP gene, stpA gene, JW2645 gene, ygaC gene, ygaM gene, nrdH gene, nrdI gene, nrdE gene, proV gene, proW gene, proX gene, JW2655 gene, JW2656 gene, ygaZ gene, ygaH gene, srlA gene, srlB gene, srlD gene, gutM gene, srlR gene, gutQ gene, gltF gene, yhcA gene, yhcD gene, yhcE gene, yhcE gene, yhcF gene, yhcG gene, yhcH gene, nanK gene, nanE gene, yegE gene, alkA gene, yegD gene, JW2055 gene, JW2056 gene, JW2057 gene, JW2058 gene, yegM gene, yegN gene, yegO gene, yegB gene, baeS gene, baeR gene, JW2065 gene, yegQ gene, ogrK gene, JW2068 gene, JW2069 gene, yegS gene, gatR gene, JW2072 gene, JW2073 gene, gatR gene, gatD gene, gatC gene, gatB gene, gatA gene, gatZ gene, gatY gene, fbaB gene, xegT gene, yegU gene, yegV gene, yegW gene, yegX gene, molR gene, yehI gene, yehK gene, yehL gene, yehO gene, yehP gene, yehQ gene, yehR gene, yehS gene, yehT gene, yehU gene, yehV gene, yehW gene, yehX gene, yehY gene, yehZ gene, bglX gene, dld gene, pbpG gene, yohC gene, yeiI gene, yeiJ gene, yeiK gene, yeiL gene, yeiM gene, yeiN gene, yeiC gene, cmtA gene, cmtB gene, intB gene, JW4228 gene, yjgW gene, yjgX gene, yjgY gene, yjgZ gene, yi41 gene, yi42 gene, yjhB gene, yjhC gene, yjhD gene, yjhE gene, yi91 gene, JW4244 gene, JW4245 gene, JW4246 gene, yjhU gene, yjhF gene, yjhG gene, yjhH gene, yjhI gene, sgcR gene, sgcE gene, sgcA gene, sgcQ gene, sgcC gene, JW4266.5 gene, sgcX gene, yjhP gene, yjhQ gene, JW4269.5 gene, JW4270 gene, JW4270.5 gene, yjhR gene, yjhS gene, yjhT gene, yjhA gene, fimB gene, fimE gene, fimnA gene, fimI gene, fimC gene, fimD gene, fimF gene, fimG gene, fimH gene, gntP gene, uxuA gene, uxuB gene, uxuR gene, yjiC gene, yjiD gene, yjiE gene, iadA gene, yjiG gene, yjiH gene, yjiI gene, yjiJ gene, yjiK gene, JW4296.5 gene, yjiL gene, yjiM gene, yjiN gene, yjiO gene, yjiP gene, yjiQ gene, yjiR gene, yjiS gene, yjiT gene, yjiV gene, mcrD gene, mcrC gene, mcrB gene, yjiW gene, hsdS gene, hsdM gene, hsdR gene, mrr gene, yjiA gene, yjiX gene, yjiY gene, tsr gene, yjjL gene, JW4320 gene, yjjM gene, yjjN gene, mdoB gene, yjjA gene, kdpF gene, ybfA gene, rhsC gene, JW0690 gene, ybfB gene, rhsA gene, ybfC gene, ybfL gene, ybfD gene, ybgA gene, yjfI gene, yjfJ gene, yjfK gene, yjfL gene, yjfM gene, yjfC gene, aidB gene, yjfN gene, yjfO gene, yjfP gene, yjfQ gene, yjfR gene, sgaT gene, sgaB gene, sgaA gene, sgaH gene, sgaU gene, rhsB gene, JW3448 gene, yhhH gene, yibA gene, yhhI gene, yhhJ gene, yhiH gene, yhiI gene, yhiJ gene, yhiK gene, yhiL gene, yhiM gene, yhiN gene, JW0782 gene, ybiA gene, dinG gene, ybiB gene, ybiC gene, ybiJ gene, ybiI gene, ybiX gene, ybiL gene, ybiM gene, ybiN gene, ybiO gene, glnQ gene, glnP gene, glnH gene, yliA gene, yliB gene, yliC gene, yliD gene, JW0817 gene, JW0818 gene, yliG gene, yliH gene, yliI gene, yliJ gene, dacC gene, deoR gene, ybjG gene, ybjC gene, mdaA gene, rimK gene, ybjN gene, potF gene, potG gene, potH gene, potI gene, ybjO gene, ybjF gene, artJ gene, artM gene, artQ gene, artI gene, artP gene, ybjP gene, JW0850 gene, JW0851 gene, JW0852 gene, ybjT gene and ltaA gene, or homologous gene thereof.
[0367] (26) The E. coli mutant strain according to any one of (23) to (25) comprising chromosomal DNA that does not comprise DNA having the nucleotide sequences as shown in [1] to [43] of the nucleotide sequence as shown in SEQ ID NO: 1 or DNA equivalent thereto.
[0368] [1] a nucleotide sequence of nucleotides 243965 to 253410
[0369] [2] a nucleotide sequence of nucleotides 261964 to 387531
[0370] [3] a nucleotide sequence of nucleotides 389139 to 403703
[0371] [4] a nucleotide sequence of nucleotides 518030 to 532711
[0372] [5] a nucleotide sequence of nucleotides 535505 to 550215
[0373] [6] a nucleotide sequence of nucleotides 563941 to 608118
[0374] [7] a nucleotide sequence of nucleotides 728821 to 739593
[0375] [8] a nucleotide sequence of nucleotides 832552 to 848089
[0376] [9] a nucleotide sequence of nucleotides 867638 to 883473
[0377] [10] a nucleotide sequence of nucleotides 890998 to 909379
[0378] [11] a nucleotide sequence of nucleotides 1048888 to 1097019
[0379] [12] a nucleotide sequence of nucleotides 1198106 to 1225146
[0380] [13] a nucleotide sequence of nucleotides 1630912 to 1641038
[0381] [14] a nucleotide sequence of nucleotides 1642632 to 1650222
[0382] [15] a nucleotide sequence of nucleotides 1964524 to 1993075
[0383] [16] a nucleotide sequence of nucleotides 1996662 to 2028209
[0384] [17] a nucleotide sequence of nucleotides 2033449 to 2044376
[0385] [18] a nucleotide sequence of nucleotides 2069149 to 2081926
[0386] [19] a nucleotide sequence of nucleotides 2104393 to 2116064
[0387] [20] a nucleotide sequence of nucleotides 2146264 to 2187855
[0388] [21] a nucleotide sequence of nucleotides 2200669 to 2229850
[0389] [22] a nucleotide sequence of nucleotides 2255895 to 2263491
[0390] [23] a nucleotide sequence of nucleotides 2755677 to 2789480
[0391] [24] a nucleotide sequence of nucleotides 2795174 to 2800890
[0392] [25] a nucleotide sequence of nucleotides 2804308 to 2810147
[0393] [26] a nucleotide sequence of nucleotides 2825314 to 2830262
[0394] [27] a nucleotide sequence of nucleotides 2985362 to 3033128
[0395] [28] a nucleotide sequence of nucleotides 3077085 to 3078916
[0396] [29] a nucleotide sequence of nucleotides 3110110 to 3134341
[0397] [30] a nucleotide sequence of nucleotides 3360737 to 3370547
[0398] [31] a nucleotide sequence of nucleotides 3618576 to 3636916
[0399] [32] a nucleotide sequence of nucleotides 3854662 to 3865831
[0400] [33] a nucleotide sequence of nucleotides 3867102 to 3877010
[0401] [34] a nucleotide sequence of nucleotides 3926659 to 3938878
[0402] [35] a nucleotide sequence of nucleotides 4059898 to 4079659
[0403] [36] a nucleotide sequence of nucleotides 4086451 to 4099982
[0404] [37] a nucleotide sequence of nucleotides 4139232 to 4149709
[0405] [38] a nucleotide sequence of nucleotides 4235359 to 4251735
[0406] [39] a nucleotide sequence of nucleotides 4298977 to 4311511
[0407] [40] a nucleotide sequence of nucleotides 4313318 to 4329721
[0408] [41] a nucleotide sequence of nucleotides 4409533 to 4423151
[0409] [42] a nucleotide sequence of nucleotides 4496202 to 4509534
[0410] [43] a nucleotide sequence of nucleotides 4517876 to 4599637
[0411] (27) The E. coli mutant strain according to any one of (23) to (26) comprising chromosomal DNA that does not comprise ygiS gene, ygiT gene, ygiU gene, JW2991 gene, ygiW gene, ygiX gene, ygiY gene, ygiZ gene, mdaB gene and ygiN gene, or homologous gene thereof.
[0412] (28) The E. coli mutant strain according to any one of (23) to (27) comprising chromosomal DNA that does not comprise DNA having a nucleotide sequence comprising nucleotides 3165628 to 3172940 of the nucleotide sequence as shown in SEQ ID NO: 1 or DNA equivalent thereto.
[0413] (29) The E. coli mutant strain according to any one of (23) to (28) comprising chromosomal DNA that does not comprise ybeL gene, ybeQ gene, ybeR gene, ybeS gene, ybeT gene, ybeU gene, ybeV gene, ybeW gene, ybeK gene, gltL gene, gltK gene, gltJ gene, ybeJ gene and JW0651 gene, or homologous gene thereof.
[0414] (30) The E. coli mutant strain according to any one of (23) to (29) comprising chromosomal DNA that does not comprise DNA having a nucleotide sequence comprising nucleotides 675104 to 689374 of the nucleotide sequence as shown in SEQ ID NO: 1 or DNA equivalent thereto.
[0415] (31) The E. coli mutant strain according to any one of (23) to (30) comprising chromosomal DNA that does not comprise yfcC gene, JW2296 gene, yfcE gene, yfcF gene, yfcG gene, folX gene, JW2301 gene, yfcI gene, hisP gene, hisM gene, hisQ gene, hisJ gene, argT gene, yfdB gene, JW2346 gene, yfdH gene, JW2348 gene, yfdK gene, yfdL gene, yfdM gene, xylU gene, yfdN gene, yfdO gene, JW2356 gene, JW2357 gene, JW2358 gene, JW2359 gene, JW2360 gene, JW2378 gene, yqhT gene, ptwC gene and ptwB gene, or homologous gene thereof.
[0416] (32) The E. coli mutant strain according to any one of (23) to (31) comprising chromosomal DNA that does not comprise DNA having the nucleotide sequences as shown in [1] to [3] below of the nucleotide sequence as shown in SEQ ID NO: 1 or DNA equivalent thereto.
[0417] [1] a nucleotide sequence of nucleotides 2423365 to 2434098
[0418] [2] a nucleotide sequence of nucleotides 2472852 to 2482482
[0419] [3] a nucleotide sequence of nucleotides 2505075 to 2514557
[0420] (33) The E. coli mutant strain according to any one of (23) to (32) comprising chromosomal DNA that does not comprise pinO gene, gspA gene, gspC gene, gspD gene, gspE gene, hofF gene, hofG gene, hofH gene, gspI gene, gspJ gene, gspK gene, gspL gene, pshM gene, hofD gene, bfr gene, yheA gene and chiA gene, or homologous gene thereof.
[0421] (34) The E. coli mutant strain according to any one of (23) to (33) comprising chromosomal DNA that does not comprise DNA having a nucleotide sequence comprising nucleotides 3453021 to 3469366 of the nucleotide sequence as shown in SEQ ID NO: 1 or DNA equivalent thereto.
[0422] (35) The E. coli mutant strain according to any one of (23) to (34) comprising chromosomal DNA that does not comprise elaB gene, elaA gene, elaC gene, elaD gene, yfbK gene, yfbL gene, yfbM gene, yfbN gene, JW2269 gene and JW2270 gene, or homologous gene thereof.
[0423] (36) The E. coli mutant strain according to any one of (23) to (35) comprising chromosomal DNA that does not comprise DNA having a nucleotide sequence comprising nucleotides 2386262 to 2395471 of the nucleotide sequence as shown in SEQ ID NO: 1 or DNA equivalent thereto.
[0424] (37) The E. coli mutant strain according to any one of (23) to (36) comprising chromosomal DNA that does not comprise yhdJ gene, yhdU gene, envR gene, acrE gene, envD gene, yhdV gene, yhdW gene, yhdX gene and yhdY gene, or homologous gene thereof.
[0425] (38) The E. coli mutant strain according to any one of (23) to (37) comprising chromosomal DNA that does not comprise DNA having a nucleotide sequence comprising nucleotides 3411160 to 3420878 of the nucleotide sequence as shown in SEQ ID NO: 1 or DNA equivalent thereto
[0426] (39) The E. coli mutant strain according to any one of (23) to (38) comprising chromosomal DNA that does not comprise chpA gene or homologous gene thereof.
[0427] (40) The E. coli mutant strain according to any one of (23) to (39) comprising chromosomal DNA that does not comprise DNA having a nucleotide sequence comprising nucleotides 2910274 to 2910573 of the nucleotide sequence as shown in SEQ ID NO: 1 or DNA equivalent thereto.
[0428] (41) The E. coli mutant strain according to any one of (23) to (40) comprising chromosomal DNA that does not comprise fhuA gene, fhuC gene, fhuD gene fhuB gene, or homologous gene thereof.

[0429] (42) The E. coli mutant strain according to any one of (23) to (41) comprising chromosomal DNA that does not comprise DNA having a nucleotide sequence comprising nucleotides 167065 to 172979 of the nucleotide sequence as shown in SEQ ID NO: 1 or DNA equivalent thereto.

TABLE 1

| | | Start number in SEQ ID | Stop number in SEQ ID |
|---|---|---|---|
| | | NO: 1 (stop number | NO: 1 (start number when |
| | | when encoded by | encoded by |
| Gene name | Coding strand | complementary strand) | complementary strand) |
| JW0001(thrA) | | 1 | 2463 |
| JW0002(thrB) | | 2465 | 3397 |
| JW0003(thrC) | | 3398 | 4684 |
| JW0004(101#4) | | 4898 | 5194 |
| JW0005(yaaA) | Complementary strand | 5347 | 6123 |
| JW0006(yaaJ) | Complementary strand | 6193 | 7623 |
| JW0007(talB) | | 7902 | 8855 |
| JW0008(mog) | | 8970 | 9557 |
| JW0009(yaaH) | Complementary strand | 9592 | 10158 |
| JW0010(102#2.1) | Complementary strand | 10307 | 11020 |
| JW0011(htgA) | | 10389 | 10979 |
| JW0012(yaaI) | Complementary strand | 11046 | 11450 |
| JW0013(dnaK) | | 11827 | 13743 |
| JW0014(dnaJ) | | 13832 | 14962 |
| JW0015(yi81) | | 15109 | 16221 |
| JW0016(yi82) | Complementary strand | 15533 | 15841 |
| JW0017(hokC) | Complementary strand | 16415 | 16624 |
| JW0018(nhaA) | | 17153 | 18319 |
| JW0019(nhaR) | | 18379 | 19284 |
| JW0020(insB) | Complementary strand | 19475 | 19978 |
| JW0021(insA) | Complementary strand | 19897 | 20172 |
| JW0022(rpsT) | Complementary strand | 20479 | 20742 |
| JW0023(ribF) | | 21071 | 22012 |
| JW0024(ileS) | | 22055 | 24871 |
| JW0025(lspA) | | 24871 | 25365 |
| JW0026(fkpB) | | 25490 | 25939 |
| JW0027(lytB) | | 25941 | 26891 |
| JW0028(yaaF) | | 26957 | 27871 |
| JW0029(dapB) | | 28038 | 28859 |
| JW0030(carA) | | 29315 | 30463 |
| JW0031(carB) | | 30481 | 33702 |
| JW0032(yaaV) | Complementary strand | 33750 | 33929 |
| JW0033(caiF) | | 33964 | 34359 |
| JW0034(caiE) | Complementary strand | 34445 | 35056 |
| JW0035(caiD) | Complementary strand | 35041 | 35934 |
| JW0036(caiC) | Complementary strand | 35935 | 37503 |
| JW0037(caiB) | Complementary strand | 37562 | 38779 |
| JW0038(caiA) | Complementary strand | 38908 | 40050 |
| JW0039(caiT) | Complementary strand | 40081 | 41595 |
| JW0040(fixA) | | 42067 | 42837 |
| JW0041(fixB) | | 42852 | 43793 |
| JW0042(fixC) | | 43844 | 45130 |
| JW0043(fixX) | | 45127 | 45414 |
| JW0044(yaaU) | | 45471 | 46802 |
| JW0045(yabF) | | 46910 | 47440 |
| JW0046(kefC) | | 47433 | 49295 |
| JW0047(folA) | | 49487 | 49966 |
| JW0048(apaH) | Complementary strand | 50044 | 50886 |
| JW0049(apaG) | Complementary strand | 50893 | 51270 |
| JW0050(ksgA) | Complementary strand | 51273 | 52094 |
| JW0051(pdxA) | Complementary strand | 52091 | 53080 |
| JW0052(surA) | Complementary strand | 53080 | 54366 |
| JW0053(imp) | Complementary strand | 54419 | 56773 |
| JW0054(djlA) | | 57028 | 57843 |
| JW0055(yabP) | | 58138 | 58788 |
| JW0056(yabQ) | | 58785 | 58943 |
| JW0057(rluA) | Complementary strand | 59351 | 60010 |
| JW0058(hepA) | Complementary strand | 60022 | 62928 |
| JW0059(polB) | Complementary strand | 63093 | 65444 |
| JW0060(araD) | Complementary strand | 65519 | 66214 |
| JW0061(araA) | Complementary strand | 66499 | 68001 |
| JW0062(araB) | Complementary strand | 68012 | 69712 |
| JW0063(araC) | | 70051 | 70929 |
| JW0064(yabI) | | 71066 | 71779 |
| JW0065(yabJ) | Complementary strand | 71893 | 72591 |
| JW0066(yabK) | Complementary strand | 72575 | 74185 |
| JW0067(tbpA) | Complementary strand | 74161 | 75144 |
| JW0068(yabN) | Complementary strand | 75308 | 76963 |
| JW0069(yabM) | | 77285 | 78463 |
| JW0070(leuD) | Complementary strand | 78512 | 79117 |
| JW0071(leuC) | Complementary strand | 79128 | 80528 |
| JW0072(leuB) | Complementary strand | 80531 | 81622 |
| JW0073(leuA) | Complementary strand | 81622 | 83193 |
| JW0074(leuL) | Complementary strand | 83286 | 83372 |
| JW0075(leuO) | | 84032 | 84976 |
| JW0076(ilvI) | | 85294 | 87018 |
| JW0077(ilvH) | | 87021 | 87512 |
| JW0078(fruR) | | 87692 | 88696 |
| JW0079(yabB) | | 89298 | 89756 |
| JW0080(yabC) | | 89758 | 90699 |
| JW0081(ftsL) | | 90696 | 91061 |
| JW0082(ftsI) | | 91077 | 92843 |
| JW0083(murE) | | 92830 | 94317 |
| JW0084(murF) | | 94314 | 95672 |
| JW0085(mraY) | | 95666 | 96748 |
| JW0086(murD) | | 96751 | 98067 |
| JW0087(ftsW) | | 98067 | 99311 |
| JW0088(murG) | | 99308 | 100375 |
| JW0089(murC) | | 100429 | 101904 |
| JW0090(ddlB) | | 101897 | 102817 |
| JW0091(ftsQ) | | 102819 | 103649 |
| JW0092(ftsA) | | 103646 | 104908 |
| JW0093(ftsZ) | | 104969 | 106120 |
| JW0094(lpxC) | | 106221 | 107138 |
| JW0095(yacA) | | 107438 | 107881 |
| JW0096(secA) | | 107943 | 110648 |
| JW0097(mutT) | | 110708 | 111097 |
| JW0098(yacG) | Complementary strand | 111313 | 111465 |
| JW0099(yacF) | Complementary strand | 111520 | 112263 |
| JW0100(yacE) | Complementary strand | 112263 | 112883 |
| JW0101(guaC) | | 113108 | 114151 |
| JW0102(hofC) | Complementary strand | 114186 | 115388 |
| JW0103(hofB) | Complementary strand | 115378 | 116763 |
| JW0104(ppdD) | Complementary strand | 116773 | 117213 |
| JW0105(nadC) | Complementary strand | 117416 | 118309 |
| JW0106(ampD) | | 118397 | 118948 |
| JW0107(ampE) | | 118945 | 119799 |
| JW0108(aroP) | Complementary strand | 119842 | 121215 |
| JW0109(pdhR) | | 121756 | 122520 |
| JW0110(aceE) | | 122681 | 125344 |
| JW0111(aceF) | | 125359 | 127251 |
| JW0112(lpdA) | | 127576 | 129000 |
| JW0113(yacH) | Complementary strand | 129071 | 130924 |
| JW0114(acnB) | | 131279 | 133876 |
| JW0115(yacL) | | 134052 | 134414 |
| JW0116(speD) | Complementary strand | 134452 | 135246 |
| JW0117(speE) | Complementary strand | 135262 | 136128 |
| JW0118(yacC) | Complementary strand | 136234 | 136581 |
| JW0119(yacK) | | 136747 | 138297 |
| JW0120(gcd) | Complementary strand | 138499 | 140889 |
| JW0121(hpt) | | 141083 | 141631 |
| JW0122(yadF) | Complementary strand | 141672 | 142334 |
| JW0123(yadG) | | 142443 | 143369 |
| JW0124(yadH) | | 143366 | 144136 |
| JW0125(yadI) | | 144241 | 144681 |
| JW0126(yadJ) | | 144745 | 145974 |
| JW0127(panD) | Complementary strand | 145978 | 146358 |
| JW0128(yadD) | | 146683 | 147534 |
| JW0129(panC) | Complementary strand | 147608 | 148459 |
| JW0130(panB) | Complementary strand | 148471 | 149265 |
| JW0131(yadC) | Complementary strand | 149379 | 150617 |
| JW0132(yadK) | Complementary strand | 150667 | 151263 |
| JW0133(yadL) | Complementary strand | 151290 | 151895 |
| JW0134(yadM) | Complementary strand | 151907 | 152476 |
| JW0135(htrE) | Complementary strand | 152493 | 155090 |
| JW0136(ecpD) | Complementary strand | 155125 | 155865 |
| JW0137(yadN) | Complementary strand | 155963 | 156547 |
| JW0138(folK) | Complementary strand | 156917 | 157396 |
| JW0139(pcnB) | Complementary strand | 157393 | 158811 |
| JW0140(yadB) | Complementary strand | 158850 | 159776 |
| JW0141(dksA) | Complementary strand | 159813 | 160268 |
| JW0142(sfsA) | Complementary strand | 160446 | 161150 |
| JW0143(ligT) | Complementary strand | 161165 | 161704 |
| JW0144(hrpB) | | 161769 | 164198 |
| JW0145(ponB) | | 164394 | 166928 |
| JW0146(fhuA) | | 167148 | 169391 |
| JW0147(fhuC) | | 169442 | 170239 |
| JW0148(fhuD) | | 170239 | 171129 |
| JW0149(fhuB) | | 171126 | 173108 |
| JW0150(hemL) | Complementary strand | 173266 | 174546 |
| JW0151(yadQ) | | 174882 | 176192 |
| JW0152(yadR) | | 176274 | 176618 |
| JW0153(yadS) | Complementary strand | 176665 | 177288 |
| JW0154(yadT) | Complementary strand | 177326 | 178126 |
| JW0155(pfs) | Complementary strand | 178119 | 178817 |
| JW0156(dgt) | | 178901 | 180418 |
| JW0157(htrA) | | 180548 | 181972 |
| JW0158(yaeG) | | 182109 | 183284 |
| JW0159(yaeH) | Complementary strand | 183373 | 183759 |
| JW0160(yaeI) | Complementary strand | 183921 | 184454 |
| JW0161(dapD) | Complementary strand | 184787 | 185611 |
| JW0162(glnD) | Complementary strand | 185642 | 188314 |
| JW0163(map) | Complementary strand | 188376 | 189170 |
| JW0164(rpsB) | | 189538 | 190263 |
| JW0164.5(120#5) | Complementary strand | 190215 | 190466 |
| JW0165(tsf) | | 190521 | 191372 |
| JW0166(smb) | | 191519 | 192244 |
| JW0167(rrf) | | 192536 | 193093 |
| JW0168(dxr) | | 193185 | 194381 |
| JW0169(rth) | | 194567 | 195328 |
| JW0170(cdsA) | | 195449 | 196198 |
| JW0171(yaeL) | | 196210 | 197562 |
| JW0172(yzzN) | | 197592 | 200024 |
| JW0173(hlpA) | | 200146 | 200631 |
| JW0174(lpxD) | | 200635 | 201660 |
| JW0175(fabZ) | | 201765 | 202220 |
| JW0176(lpxA) | | 202224 | 203012 |
| JW0177(lpxB) | | 203012 | 204160 |
| JW0178(rnhB) | | 204157 | 204753 |
| JW0179(dnaE) | | 204790 | 208272 |
| JW0180(accA) | | 208285 | 209244 |
| JW0181(ldcC) | | 209343 | 211484 |
| JW0182(yaeR) | | 211541 | 211930 |
| JW0183(mesJ) | | 211995 | 213293 |
| JW0184(rof) | Complementary strand | 213342 | 213596 |
| JW0185(yaeP) | Complementary strand | 213589 | 213789 |
| JW0186(yaeQ) | | 213955 | 214500 |
| JW0187(yaeJ) | | 214497 | 214919 |
| JW0188(cutF) | | 214933 | 215643 |
| JW0189(yaeF) | Complementary strand | 215843 | 216721 |
| JW0190(proS) | Complementary strand | 216721 | 218439 |
| JW0191(yaeB) | Complementary strand | 218551 | 219258 |
| JW0192(rcsF) | Complementary strand | 219255 | 219659 |
| JW0193(yaeC) | Complementary strand | 219777 | 220592 |
| JW0194(yaeE) | Complementary strand | 220632 | 221285 |
| JW0195(abc) | Complementary strand | 221278 | 222309 |
| JW0196(yaeD) | | 222497 | 223072 |
| JW0197(yafB) | | 228831 | 229634 |
| JW0198(yafC) | Complementary strand | 229631 | 230545 |
| JW0199(yafD) | | 230807 | 231586 |
| JW0200(yafE) | | 231590 | 232213 |
| JW0201(dniR) | Complementary strand | 232261 | 232929 |
| JW0202(gloB) | Complementary strand | 233691 | 234446 |
| JW0203(yafS) | | 234480 | 235202 |
| JW0204(rnhA) | Complementary strand | 235199 | 235666 |
| JW0205(dnaQ) | | 235731 | 236462 |
| JW0206(yafT) | | 236999 | 237784 |
| JW0207(yafU) | Complementary strand | 238410 | 238748 |
| JW0208(ybfL) | | 238854 | 239042 |
| JW0209(yafV) | Complementary strand | 239083 | 239862 |
| JW0210(up18) | | 240007 | 240480 |
| JW0211(yafH) | Complementary strand | 240523 | 243045 |
| JW0212(gmhA) | | 243207 | 243785 |
| JW0213(yafJ) | | 243991 | 244758 |
| JW0214(yafk) | Complementary strand | 244729 | 245469 |
| JW0215(yafQ) | Complementary strand | 245625 | 245903 |
| JW0216(dinJ) | Complementary strand | 245906 | 246166 |
| JW0217(yafL) | | 246376 | 247125 |
| JW0218(yafM) | | 247301 | 247798 |
| JW0219(fhiA) | Complementary strand | 248022 | 249761 |
| JW0220(lafU) | | 249856 | 250491 |
| JW0221(dinP) | | 250562 | 251617 |
| JW0222(yafN) | | 251669 | 251962 |
| JW0223(yafO) | | 251965 | 252363 |
| JW0224(yafP) | | 252373 | 252825 |
| JW0225(127#12) | | 253131 | 253397 |
| JW0226(prfH) | | 253366 | 253866 |
| JW0227(pepD) | Complementary strand | 253923 | 255380 |
| JW0228(gpt) | | 255641 | 256099 |
| JW0229(yafA) | | 256191 | 257435 |
| JW0230(crl) | | 257493 | 257894 |
| JW0231(phoE) | Complementary strand | 257933 | 258988 |
| JW0232(proB) | | 259276 | 260379 |
| JW0233(proA) | | 260391 | 261644 |
| JW0234(ykfI) | Complementary strand | 262216 | 262557 |
| JW0235(yafW) | Complementary strand | 262578 | 262895 |
| JW0235.5(yeeT) | Complementary strand | 262914 | 263135 |
| JW0236(ykfG) | Complementary strand | 263144 | 263620 |
| JW0237(yafX) | Complementary strand | 263636 | 264268 |
| JW0238(ykfF) | Complementary strand | 264192 | 264593 |
| JW0239(ykfB) | Complementary strand | 264508 | 264975 |
| JW0240(yafY) | Complementary strand | 264998 | 265855 |
| JW0241(ypjK) | Complementary strand | 265441 | 265617 |
| JW0242(yafZ) | Complementary strand | 266072 | 266893 |
| JW0243(ykfA) | Complementary strand | 266985 | 267848 |
| JW0244(perR) | Complementary strand | 268177 | 269070 |
| JW0245(129#3.1) | | 269166 | 269534 |
| JW0246(129#3.2) | | 269491 | 270642 |
| JW0247(129#5) | | 270718 | 271143 |
| JW0248(ykfC) | | 271750 | 272880 |
| JW0249(130#0.1) | | 272841 | 272951 |
| JW0250(is5B) | Complementary strand | 272989 | 274005 |
| JW0251(yi51) | | 273325 | 273693 |
| JW0252(mmuP) | | 274189 | 275616 |
| JW0253(mmuM) | | 275603 | 276535 |
| JW0254(afuC) | Complementary strand | 276644 | 277690 |
| JW0255(130#4) | Complementary strand | 277702 | 278064 |
| JW0256(insB) | Complementary strand | 278066 | 278569 |
| JW0257(insA) | Complementary strand | 278488 | 278763 |
| JW0258(130#5) | Complementary strand | 278912 | 279250 |
| JW0259(yagB) | Complementary strand | 279273 | 279623 |
| JW0260(yagA) | Complementary strand | 279717 | 280871 |
| JW0261(yagE) | | 281145 | 282074 |
| JW0262(yagF) | | 282089 | 284056 |
| JW0263(yagG) | | 284283 | 285665 |
| JW0264(yagH) | | 285677 | 287287 |
| JW0265(yagI) | Complementary strand | 287292 | 288050 |
| JW0266(argF) | Complementary strand | 288189 | 289193 |
| JW0267(yfjI) | | 289293 | 289526 |
| JW0268(insB) | Complementary strand | 289537 | 290040 |
| JW0269(insA) | Complementary strand | 289959 | 290234 |
| JW0270(yagJ) | | 290388 | 291119 |
| JW0271(yagK) | Complementary strand | 291210 | 291836 |
| JW0272(yagL) | Complementary strand | 292108 | 292806 |
| JW0273(yagM) | Complementary strand | 292833 | 293687 |
| JW0274(yagN) | Complementary strand | 294027 | 294467 |
| JW0275(intF) | Complementary strand | 294584 | 295984 |
| JW0276(yagP) | Complementary strand | 296269 | 296679 |
| JW0277(yagQ) | Complementary strand | 296658 | 297614 |
| JW0278(yagR) | Complementary strand | 297624 | 299822 |
| JW0279(yagS) | Complementary strand | 299819 | 300775 |
| JW0280(yagT) | Complementary strand | 300772 | 301461 |
| JW0281(yagU) | | 301879 | 302493 |
| JW0282(ykgJ) | Complementary strand | 302741 | 303070 |
| JW0283(yagV) | Complementary strand | 303383 | 304138 |
| JW0284(yagW) | Complementary strand | 304062 | 305705 |
| JW0285(yagX) | Complementary strand | 305695 | 308220 |
| JW0286(yagY) | Complementary strand | 308246 | 308914 |
| JW0287(yagZ) | Complementary strand | 308972 | 309559 |
| JW0288(ykgK) | Complementary strand | 309634 | 309885 |
| JW0289(ykgL) | | 310994 | 311227 |
| JW0290(ykgM) | Complementary strand | 311402 | 311668 |
| JW0291(eaeH) | | 313245 | 314132 |
| JW0292(134#4.1) | | 314179 | 314478 |
| JW0293(134#4.2) | | 314475 | 315341 |
| JW0294(ykgA) | Complementary strand | 315338 | 316057 |
| JW0295(ykgB) | Complementary strand | 316614 | 317216 |
| JW0296(ykgI) | Complementary strand | 317219 | 317470 |
| JW0297(merA) | Complementary strand | 317564 | 318916 |
| JW0298(ykgD) | | 319115 | 319969 |
| JW0299(ykgE) | | 320562 | 321215 |
| JW0300(ykgF) | | 321226 | 322653 |
| JW0301(ykgG) | | 322652 | 323341 |
| JW0302(ykgH) | Complementary strand | 323584 | 324252 |
| JW0303(betA) | Complementary strand | 324465 | 326135 |
| JW0304(betB) | Complementary strand | 326149 | 327621 |
| JW0305(betI) | Complementary strand | 327635 | 328222 |
| JW0306(betT) | | 328351 | 330384 |
| JW0307(yahA) | | 331259 | 332347 |
| JW0308(yahB) | Complementary strand | 332389 | 333321 |
| JW0309(yahC) | Complementary strand | 333413 | 333910 |
| JW0310(yahD) | | 334168 | 334773 |
| JW0311(yahE) | | 334813 | 335676 |
| JW0312(yahF) | | 335666 | 337213 |
| JW0313(yahG) | | 337213 | 338631 |
| JW0314(yahH) | | 338552 | 338977 |
| JW0315(arcM) | | 339053 | 340003 |
| JW0316(yahJ) | | 340013 | 341395 |
| JW0317(yahK) | | 341772 | 342821 |
| JW0318(yahL) | | 343064 | 343879 |
| JW0319(yahM) | | 344262 | 344537 |
| JW0320(yahN) | Complementary strand | 344554 | 345225 |
| JW0321(yahO) | | 345372 | 345647 |
| JW0322(prpR) | Complementary strand | 345745 | 347331 |
| JW0323(bcpA) | | 347570 | 348460 |
| JW0324(prpC) | | 348900 | 350069 |
| JW0325(prpD) | | 350103 | 351554 |
| JW0326(prpE) | | 351594 | 353480 |
| JW0327(codB) | | 353810 | 355069 |
| JW0328(codA) | | 355059 | 356342 |
| JW0329(cynR) | Complementary strand | 356679 | 357578 |
| JW0330(cynT) | | 357687 | 358346 |
| JW0331(cynS) | | 358377 | 358847 |
| JW0332(cynX) | | 358880 | 360034 |
| JW0333(lacA) | Complementary strand | 360137 | 360748 |
| JW0334(lacY) | Complementary strand | 360814 | 362067 |
| JW0335(lacZ) | Complementary strand | 362119 | 365193 |
| JW0336(lacI) | Complementary strand | 365316 | 366398 |
| JW0337(mhpR) | Complementary strand | 366475 | 367422 |
| JW0338(mhpA) | | 367499 | 369163 |
| JW0339(mhpB) | | 369165 | 370109 |
| JW0340(mhpC) | | 370112 | 370993 |
| JW0341(mhpD) | | 371003 | 371812 |
| JW0342(mhpF) | | 371809 | 372759 |
| JW0343(mhpE) | | 372756 | 373769 |
| JW0344(mhpT) | | 374302 | 375558 |
| JW0345(yaiL) | | 375660 | 376199 |
| JW0346(yaiM) | Complementary strand | 376423 | 377256 |
| JW0347(adhC) | Complementary strand | 377350 | 378459 |
| JW0348(yaiN) | Complementary strand | 378494 | 378769 |
| JW0349(yaiO) | Complementary strand | 378957 | 379730 |
| JW0350(140#9) | Complementary strand | 379732 | 379947 |
| JW0351(yi2A) | | 380194 | 380604 |
| JW0352(yi22) | | 380562 | 381467 |
| JW0353(yi24) | Complementary strand | 380607 | 381038 |
| JW0354(yi23) | | 380635 | 380928 |
| JW0355(yaiP) | Complementary strand | 381627 | 382823 |
| JW0356(yaiS) | Complementary strand | 382947 | 383504 |
| JW0357(tauA) | | 384120 | 385082 |
| JW0358(tauB) | | 385095 | 385862 |
| JW0359(tauC) | | 385859 | 386686 |
| JW0360(ssiD) | | 386683 | 387534 |
| JW0361(hemB) | Complementary strand | 387641 | 388615 |
| JW0362(yaiT) | | 389139 | 390599 |
| JW0363(141#3.1) | Complementary strand | 390627 | 391493 |
| JW0364(141#3.2) | Complementary strand | 391490 | 391789 |
| JW0365(yaiU) | | 391909 | 393306 |
| JW0366(yaiV) | | 393349 | 394017 |
| JW0367(ampH) | Complementary strand | 394018 | 395148 |
| JW0368(sbmA) | | 395527 | 396747 |
| JW0369(yaiW) | | 396760 | 397854 |
| JW0370(yaiY) | Complementary strand | 397913 | 398221 |
| JW0371(yaiZ) | | 398412 | 398693 |
| JW0372(ddlA) | Complementary strand | 398717 | 399811 |
| JW0373(yaiB) | | 400274 | 400534 |
| JW0374(phoA) | | 400635 | 402050 |
| JW0375(psiF) | | 402151 | 402489 |
| JW0376(yaiC) | | 402591 | 403706 |
| JW0377(proC) | Complementary strand | 403723 | 404532 |
| JW0378(yaiI) | | 404652 | 405110 |
| JW0379(aroL) | | 405293 | 405817 |
| JW0380(yaiA) | | 405867 | 406058 |
| JW0381(aroM) | | 406316 | 406993 |
| JW0382(yaiE) | | 407065 | 407349 |
| JW0383(ykiA) | | 407557 | 407838 |
| JW0384(yaiD) | Complementary strand | 407996 | 408907 |
| JW0385(yajF) | | 409032 | 409940 |
| JW0386(araJ) | Complementary strand | 410185 | 411369 |
| JW0387(sbcC) | Complementary strand | 411495 | 414641 |
| JW0388(sbcD) | Complementary strand | 414638 | 415840 |
| JW0389(phoB) | | 416030 | 416719 |
| JW0390(phoR) | | 416777 | 418072 |
| JW0391(brnQ) | | 418479 | 419798 |
| JW0392(proY) | | 419871 | 421247 |
| JW0393(malZ) | | 421403 | 423220 |
| JW0394(yajH) | Complementary strand | 423225 | 423806 |
| JW0395(queA) | | 423899 | 424969 |
| JW0396(tgt) | | 425025 | 426152 |
| JW0397(yajC) | | 426175 | 426507 |
| JW0398(secD) | | 426535 | 428382 |
| JW0399(secF) | | 428393 | 429364 |
| JW0400(yajD) | | 429493 | 429840 |
| JW0401(tsx) | Complementary strand | 430017 | 430901 |
| JW0402(yajI) | Complementary strand | 431200 | 431799 |
| JW0403(ybaD) | | 431890 | 432339 |
| JW0404(ribD) | | 432343 | 433446 |
| JW0405(ribH) | | 433535 | 434005 |
| JW0406(nusB) | | 434025 | 434444 |
| JW0407(thiL) | | 434522 | 435499 |
| JW0408(pgpA) | | 435477 | 435995 |
| JW0409(yajO) | Complementary strand | 436049 | 437023 |
| JW0410(dxs) | Complementary strand | 437203 | 439065 |
| JW0411(ispA) | Complementary strand | 439090 | 439989 |
| JW0412(xseB) | Complementary strand | 439989 | 440231 |
| JW0413(thiI) | | 440437 | 441885 |
| JW0414(thiJ) | Complementary strand | 441939 | 442535 |
| JW0415(apbA) | Complementary strand | 442492 | 443403 |
| JW0416(yajQ) | | 443403 | 444062 |
| JW0417(yajR) | Complementary strand | 444190 | 445560 |
| JW0418(cyoE) | Complementary strand | 445703 | 446593 |
| JW0419(cyoD) | Complementary strand | 446605 | 446934 |
| JW0420(cyoC) | Complementary strand | 446934 | 447548 |
| JW0421(cyoB) | Complementary strand | 447538 | 449529 |
| JW0422(cyoA) | Complementary strand | 449551 | 450498 |
| JW0423(ampG) | Complementary strand | 450958 | 452433 |
| JW0424(yajG) | Complementary strand | 452477 | 453055 |
| JW0425(bolA) | | 453327 | 453677 |
| JW0426(tig) | | 454021 | 455319 |
| JW0427(clpP) | | 455565 | 456188 |
| JW0428(clpX) | | 456314 | 457588 |
| JW0429(lon) | | 457776 | 460130 |
| JW0430(hupB) | | 460339 | 460611 |
| JW0431(ybaU) | | 460803 | 462674 |
| JW0432(ybaV) | | 462825 | 463196 |
| JW0433(ybaW) | | 463290 | 463688 |
| JW0434(ybaX) | Complementary strand | 463740 | 464435 |
| JW0435(ybaE) | Complementary strand | 464500 | 466200 |
| JW0436(cof) | | 466300 | 467118 |
| JW0437(ybaO) | | 467271 | 467729 |
| JW0438(mdlA) | | 467759 | 469531 |
| JW0439(mdlB) | | 469410 | 471305 |
| JW0440(glnK) | | 471486 | 471824 |
| JW0441(amtB) | | 471854 | 473140 |
| JW0442(tesB) | Complementary strand | 473189 | 474049 |
| JW0443(ybaY) | | 474267 | 474839 |
| JW0444(ybaZ) | Complementary strand | 474870 | 475259 |
| JW0445(ybaA) | | 475560 | 475913 |
| JW0446(ylaB) | Complementary strand | 475955 | 477511 |
| JW0447(ylaC) | Complementary strand | 477669 | 478178 |
| JW0448(maa) | Complementary strand | 478255 | 478806 |
| JW0449(hha) | Complementary strand | 478978 | 479196 |
| JW0450(ybaJ) | Complementary strand | 479222 | 479596 |
| JW0451(acrB) | Complementary strand | 480142 | 483291 |
| JW0452(acrA) | Complementary strand | 483314 | 484507 |
| JW0453(acrR) | | 484649 | 485296 |
| JW0454(aefA) | | 485424 | 488786 |
| JW0455(ybaM) | Complementary strand | 488998 | 489159 |
| JW0456(priC) | Complementary strand | 489173 | 489700 |
| JW0457(ybaN) | | 489770 | 490147 |
| JW0458(apt) | | 490300 | 490851 |
| JW0459(dnaX) | | 490980 | 492911 |
| JW0460(ybaB) | | 492964 | 493293 |
| JW0461(recR) | | 493293 | 493898 |
| JW0462(htpG) | | 494008 | 495882 |
| JW0463(adk) | | 496063 | 496707 |
| JW0464(hemH) | | 496943 | 497905 |
| JW0465(aes) | Complementary strand | 497902 | 498861 |
| JW0466(gsk) | | 499013 | 500317 |
| JW0467(ybaL) | Complementary strand | 500450 | 502126 |
| JW0468(fsr) | Complementary strand | 502364 | 503584 |
| JW0469(ushA) | | 503802 | 505454 |
| JW0470(ybaK) | Complementary strand | 505491 | 505970 |
| JW0471(ybaP) | Complementary strand | 506174 | 506968 |
| JW0472(ybaQ) | | 507106 | 507447 |
| JW0473(ybaR) | Complementary strand | 507763 | 510267 |
| JW0474(ybaS) | | 510529 | 511461 |
| JW0475(ybaT) | | 511464 | 512756 |
| JW0476(cueR) | | 512881 | 513288 |
| JW0477(ybbJ) | Complementary strand | 513289 | 513747 |
| JW0478(ybbK) | Complementary strand | 513744 | 514661 |
| JW0479(ybbL) | | 514807 | 515484 |
| JW0480(ybbM) | | 515444 | 516250 |
| JW0481(ybbN) | Complementary strand | 516313 | 517203 |
| JW0482(ybbO) | Complementary strand | 517228 | 518037 |
| JW0483(tesA) | Complementary strand | 518027 | 518653 |
| JW0484(ybbA) | | 518621 | 519307 |
| JW0485(ybbP) | | 519304 | 521718 |
| JW0486(rhsD) | | 522149 | 526429 |
| JW0487(ybbC) | | 526469 | 526837 |
| JW0488(rhsE) | | 526837 | 527547 |
| JW0489(ybbD) | | 527528 | 527788 |
| JW0490(156#1) | Complementary strand | 528533 | 528904 |
| JW0491(ybbB) | Complementary strand | 529020 | 530114 |
| JW0492(ybbS) | Complementary strand | 530183 | 531109 |
| JW0493(ybbT) | | 531339 | 531821 |
| JW0494(ybbU) | | 531899 | 532714 |
| JW0495(gcl) | | 532804 | 534585 |
| JW0496(gip) | | 534598 | 535374 |
| JW0497(ybbQ) | | 535474 | 536352 |
| JW0498(ybbV) | | 536384 | 536662 |
| JW0499(allP) | | 536521 | 537975 |
| JW0500(allA) | | 538035 | 539396 |
| JW0501(ybbY) | | 539453 | 540754 |
| JW0502(ybbZ) | | 540776 | 541921 |
| JW0503(ylbA) | Complementary strand | 542149 | 542934 |
| JW0504(allC) | Complementary strand | 542945 | 544180 |
| JW0505(ylbC) | Complementary strand | 544202 | 545251 |
| JW0506(fdrA) | | 545568 | 547235 |
| JW0507(ylbE) | | 547245 | 547505 |
| JW0508(ylbE) | | 547502 | 548503 |
| JW0509(ylbF) | | 548514 | 549329 |
| JW0510(arcC) | | 549326 | 550219 |
| JW0511(purK) | Complementary strand | 550414 | 551481 |
| JW0512(purE) | Complementary strand | 551478 | 551987 |
| JW0513(ybbF) | Complementary strand | 552105 | 552827 |
| JW0514(ppiB) | Complementary strand | 552830 | 553324 |
| JW0515(cysS) | | 553498 | 554883 |
| JW0516(ybcI) | Complementary strand | 554919 | 555440 |
| JW0517(ybcJ) | Complementary strand | 555548 | 555814 |
| JW0518(folD) | Complementary strand | 555762 | 556628 |
| JW0519(sfmA) | | 557099 | 557641 |
| JW0520(sfmC) | | 557861 | 558553 |
| JW0521(sfmD) | | 558584 | 561187 |
| JW0522(sfmH) | | 561076 | 562206 |
| JW0523(sfmF) | | 562091 | 562732 |
| JW0524(fimZ) | Complementary strand | 562735 | 563430 |
| JW0525(intD) | Complementary strand | 563702 | 564865 |
| JW0526(EXO_LAMBD) | Complementary strand | 564985 | 565248 |
| JW0527(VRPP_LAMBD) | | 565338 | 565574 |
| JW0528(159#4) | | 565729 | 566028 |
| JW0529(159#5) | | 566025 | 566891 |
| JW0530(VREN_LAMBD) | | 566949 | 567134 |
| JW0531(emrE) | | 567202 | 567534 |
| JW0532(ybcK) | | 567789 | 569315 |
| JW0533(ybcL) | | 569780 | 570331 |
| JW0534(ybcM) | | 570341 | 571138 |
| JW0535(ybcN) | | 571353 | 571808 |
| JW0536(ninE) | | 571808 | 571978 |
| JW0537(ybcO) | | 571971 | 572261 |
| JW0538(rus) | | 572258 | 572620 |
| JW0539(ybcQ) | | 572843 | 573226 |
| JW0539.5(160#10) | | 573368 | 573586 |
| JW0540(is5B) | Complementary strand | 573624 | 574640 |
| JW0541(yi51) | | 573960 | 574328 |
| JW0542(nmpC) | Complementary strand | 574645 | 575712 |
| JW0543(vlyS) | | 576285 | 576500 |
| JW0544(ybcS) | | 576500 | 576997 |
| JW0545(ybcT) | | 576982 | 577455 |
| JW0546(vboR) | Complementary strand | 577487 | 577780 |
| JW0547(ybcV) | Complementary strand | 578071 | 578604 |
| JW0548(ybcW) | | 578767 | 578973 |
| JW0549(nohB) | | 579721 | 580266 |
| JW0550(ybcX) | | 580241 | 580984 |
| JW0551(ybcY) | Complementary strand | 581039 | 581623 |
| JW0552(161#0.2) | | 581762 | 581947 |
| JW0553(appY) | | 582568 | 583317 |
| JW0554(ompT) | Complementary strand | 583567 | 584520 |
| JW0555(envY) | Complementary strand | 585034 | 585795 |
| JW0556(ybcH) | Complementary strand | 585978 | 586868 |
| JW0557(nfrA) | Complementary strand | 586869 | 589841 |
| JW0558(nfrB) | Complementary strand | 589828 | 592065 |
| JW0559(cusS) | Complementary strand | 592215 | 593669 |
| JW0560(cusR) | Complementary strand | 593647 | 594330 |
| JW0561(cusC) | | 594487 | 595860 |
| JW0562(ylcC) | | 596018 | 596350 |
| JW0563(cusB) | | 596366 | 597589 |
| JW0564(cusA) | | 597601 | 600744 |
| JW0565(pheP) | | 600846 | 602222 |
| JW0566(ybdG) | Complementary strand | 602303 | 603550 |
| JW0567(nfnB) | Complementary strand | 603658 | 604311 |
| JW0568(ybdF) | Complementary strand | 604405 | 604884 |
| JW0569(ybdJ) | Complementary strand | 604838 | 605086 |
| JW0570(ybdK) | Complementary strand | 605152 | 606270 |
| JW0571(hokE) | | 606624 | 606875 |
| JW0572(yi81) | | 606952 | 608064 |
| JW0573(yi82) | Complementary strand | 607376 | 607684 |
| JW0574(entD) | Complementary strand | 608346 | 609116 |
| JW0575(fepA) | Complementary strand | 609141 | 611441 |
| JW0576(fes) | | 611702 | 612826 |
| JW0577(164#9) | | 612829 | 613047 |
| JW0578(entF) | | 613044 | 616925 |
| JW0579(fepE) | | 617141 | 618274 |
| JW0580(fepC) | Complementary strand | 618271 | 619086 |
| JW0581(fepG) | Complementary strand | 619083 | 620075 |
| JW0582(fepD) | Complementary strand | 620072 | 621076 |
| JW0583(ybdA) | | 621187 | 622437 |
| JW0584(fepB) | Complementary strand | 622441 | 623397 |
| JW0584.5(165#7) | Complementary strand | 623401 | 623607 |
| JW0585(entC) | | 623772 | 624947 |
| JW0586(entE) | | 624957 | 626567 |
| JW0587(entB) | | 626581 | 627438 |
| JW0588(entA) | | 627438 | 628184 |
| JW0589(ybdB) | | 628187 | 628600 |
| JW0590(cstA) | | 628781 | 630886 |
| JW0591(ybdD) | | 631069 | 631266 |
| JW0592(ybdH) | Complementary strand | 631276 | 632364 |
| JW0593(ybdL) | | 632473 | 633633 |
| JW0594(ybdm) | Complementary strand | 633634 | 634263 |
| JW0595(ybdN) | Complementary strand | 634236 | 635456 |
| JW0596(ybdO) | Complementary strand | 635603 | 636505 |
| JW0597(dsbG) | Complementary strand | 636714 | 637460 |
| JW0598(ahpC) | | 637832 | 638395 |
| JW0599(ahpF) | | 638640 | 640205 |
| JW0600(ybdQ) | Complementary strand | 640326 | 640754 |
| JW0601(ybdR) | | 640975 | 642213 |
| JW0602(rnk) | Complementary strand | 642444 | 642854 |
| JW0603(rna) | Complementary strand | 643084 | 643890 |
| JW0604(citT) | Complementary strand | 644004 | 645467 |
| JW0605(citG) | Complementary strand | 645518 | 646396 |
| JW0606(citX) | Complementary strand | 646371 | 646922 |
| JW0607(citF) | Complementary strand | 646926 | 648500 |
| JW0608(citE) | Complementary strand | 648469 | 649377 |
| JW0609(citD) | Complementary strand | 649374 | 649670 |
| JW0610(citC) | Complementary strand | 649685 | 650743 |
| JW0611(citA) | | 651122 | 652780 |
| JW0612(citB) | | 652749 | 653429 |
| JW0613(dcuC) | Complementary strand | 653470 | 653946 |
| JW0614(is5B) | | 653909 | 654925 |
| JW0615(yi51) | Complementary strand | 654221 | 654589 |
| JW0616(dcuC) | Complementary strand | 654963 | 656054 |
| JW0617(crcA) | | 656643 | 657203 |
| JW0618(cspE) | | 657378 | 657587 |
| JW0619(crcB) | Complementary strand | 657641 | 658024 |
| JW0620(ybeH) | | 658117 | 658344 |
| JW0621(ybeM) | | 658341 | 658904 |
| JW0622(ybeC) | | 659033 | 659236 |
| JW0623(lipA) | Complementary strand | 659337 | 660302 |
| JW0624(ybeF) | Complementary strand | 660511 | 661464 |
| JW0625(lipB) | Complementary strand | 661723 | 662298 |
| JW0626(ybeD) | Complementary strand | 662465 | 662728 |
| JW0627(dacA) | Complementary strand | 662838 | 664049 |
| JW0628(rlpA) | Complementary strand | 664188 | 665276 |
| JW0629(mrdB) | Complementary strand | 665287 | 666399 |
| JW0630(mrdA) | Complementary strand | 666402 | 668303 |
| JW0631(ybeA) | Complementary strand | 668334 | 668801 |
| JW0632(ybeB) | Complementary strand | 668805 | 669014 |
| JW0633(phpB) | Complementary strand | 669382 | 669993 |
| JW0634(nadD) | Complementary strand | 670017 | 670658 |
| JW0635(holA) | Complementary strand | 670660 | 671691 |
| JW0636(rlpB) | Complementary strand | 671691 | 672272 |
| JW0637(leuS) | Complementary strand | 672287 | 674869 |
| JW0638(ybeL) | | 675104 | 675586 |
| JW0639(ybeQ) | Complementary strand | 675656 | 676639 |
| JW0640(ybeR) | | 676797 | 677504 |
| JW0641(ybeS) | | 677501 | 678928 |
| JW0642(ybeT) | Complementary strand | 678938 | 679492 |
| JW0643(ybeU) | | 679594 | 680301 |
| JW0644(ybeV) | | 680298 | 681749 |
| JW0645(ybeW) | Complementary strand | 681809 | 683479 |
| JW0646(ybeK) | Complementary strand | 683563 | 684498 |
| JW0647(gltL) | Complementary strand | 684616 | 685341 |
| JW0648(gltK) | Complementary strand | 685341 | 686015 |
| JW0649(gltJ) | Complementary strand | 686015 | 686755 |
| JW0650(ybeJ) | Complementary strand | 686925 | 687908 |
| JW0651(171#0.1) | | 687884 | 688045 |
| JW0652(is5B) | Complementary strand | 688083 | 689099 |
| JW0653(yi51) | | 688419 | 688787 |
| JW0654(lnt) | Complementary strand | 689429 | 690967 |
| JW0655(ybeX) | Complementary strand | 690992 | 691870 |
| JW0656(ybeY) | Complementary strand | 691960 | 692427 |
| JW0657(phoL) | Complementary strand | 692424 | 693503 |
| JW0658(yleA) | Complementary strand | 693617 | 695041 |
| JW0659(ubiF) | | 695187 | 696362 |
| JW0660(asnB) | Complementary strand | 697599 | 699263 |
| JW0661(nagD) | Complementary strand | 699660 | 700412 |
| JW0662(nagC) | Complementary strand | 700460 | 701680 |
| JW0663(nagA) | Complementary strand | 701689 | 702837 |
| JW0664(nagB) | Complementary strand | 702897 | 703697 |
| JW0665(nagE) | | 704030 | 705976 |
| JW0666(glnS) | | 706179 | 707843 |
| JW0667(ybfM) | | 708420 | 709826 |
| JW0668(ybfN) | | 709876 | 710202 |
| JW0669(fur) | Complementary strand | 710286 | 710732 |
| JW0670(ybfJ) | | 710777 | 711031 |
| JW0671(fldA) | Complementary strand | 711021 | 711551 |
| JW0672(ybfE) | Complementary strand | 711691 | 712053 |
| JW0673(ybfF) | Complementary strand | 712124 | 712888 |
| JW0674(seqA) | | 713073 | 713618 |
| JW0675(pgm) | | 713644 | 715284 |
| JW0676(ybfP) | | 715498 | 715992 |
| JW0677(ybfG) | Complementary strand | 716033 | 716395 |
| JW0678(ybfH) | Complementary strand | 716474 | 716791 |
| JW0679(potE) | Complementary strand | 717032 | 718351 |
| JW0680(speF) | Complementary strand | 718348 | 720546 |
| JW0681(ybfK) | | 720669 | 720926 |
| JW0682(kdpE) | Complementary strand | 721142 | 721744 |
| JW0683(kdpD) | Complementary strand | 721816 | 724500 |
| JW0684(kdpC) | Complementary strand | 724493 | 725065 |
| JW0685(kdpB) | Complementary strand | 725074 | 727122 |
| JW0686(kdpA) | Complementary strand | 727145 | 728818 |
| JW0687(kdpF) | Complementary strand | 728818 | 728907 |
| JW0688(ybfA) | | 729220 | 729426 |
| JW0689(rhsC) | | 729669 | 733862 |
| JW0690(174#4.1) | Complementary strand | 732195 | 732614 |
| JW0691(ybfB) | | 733862 | 734188 |
| JW0692(rhsA) | | 734306 | 735739 |
| JW0693(ybfC) | | 735736 | 736305 |
| JW0694(ybfD) | | 736531 | 736785 |
| JW0695(ybfL) | | 736986 | 738047 |
| JW0696(ybfD) | | 738178 | 738939 |
| JW0697(ybgA) | | 739087 | 739596 |
| JW0698(phrB) | | 739593 | 741011 |
| JW0699(ybgH) | Complementary strand | 741161 | 742642 |
| JW0700(ybgI) | | 742913 | 743656 |
| JW0701(ybgJ) | | 743679 | 744335 |
| JW0702(ybgK) | | 744329 | 745261 |
| JW0703(ybgL) | | 745251 | 745985 |
| JW0704(end8) | | 746021 | 746812 |
| JW0705(abrB) | Complementary strand | 746809 | 747900 |
| JW0706(ybgO) | Complementary strand | 748007 | 749095 |
| JW0707(ybgP) | Complementary strand | 749065 | 749793 |
| JW0708(ybgQ) | Complementary strand | 749808 | 752306 |
| JW0709(ybgD) | Complementary strand | 752315 | 752881 |
| JW0710(gltA) | Complementary strand | 753271 | 754554 |
| JW0711(sdhC) | | 755263 | 755652 |
| JW0712(sdhD) | | 755646 | 755993 |
| JW0713(sdhA) | | 755993 | 757759 |
| JW0714(sdhB) | | 757775 | 758491 |
| JW0715(sucA) | | 758792 | 761593 |
| JW0716(sucB) | | 761608 | 762825 |
| JW0717(sucC) | | 763100 | 764266 |
| JW0718(sucD) | | 764266 | 765135 |
| JW0719(farR) | Complementary strand | 765239 | 765961 |
| JW0720(hrsA) | | 766070 | 768046 |
| JW0721(ybgB) | | 768064 | 770697 |
| JW0722(cydA) | | 771544 | 773112 |
| JW0723(cydB) | | 773128 | 774267 |
| JW0724(ybgT) | | 774282 | 774395 |
| JW0725(ybgE) | | 774395 | 774688 |
| JW0726(ybgC) | | 774838 | 775242 |
| JW0727(tolQ) | | 775239 | 775931 |
| JW0728(tolR) | | 775935 | 776363 |
| JW0729(tolA) | | 776428 | 777693 |
| JW0730(tolB) | | 777823 | 779118 |
| JW0731(pal) | | 779153 | 779674 |
| JW0732(ybgF) | | 779684 | 780475 |
| JW0733(nadA) | | 782171 | 783214 |
| JW0734(pnuC) | | 783252 | 783971 |
| JW0735(czcD) | Complementary strand | 783968 | 784909 |
| JW0736(ybgS) | Complementary strand | 785023 | 785403 |
| JW0737(aroG) | | 785719 | 786771 |
| JW0738(gpmA) | Complementary strand | 786929 | 787681 |
| JW0739(galM) | Complementary strand | 787883 | 788923 |
| JW0740(galK) | Complementary strand | 788917 | 790065 |
| JW0741(galT) | Complementary strand | 790069 | 791115 |
| JW0742(galE) | Complementary strand | 791125 | 792141 |
| JW0743(modF) | Complementary strand | 792402 | 793874 |
| JW0744(modE) | Complementary strand | 793942 | 794730 |
| JW0745(180#2) | | 794853 | 795008 |
| JW0746(modA) | | 795175 | 795948 |
| JW0747(modB) | | 795948 | 796637 |
| JW0748(modC) | | 796640 | 797698 |
| JW0749(ybhA) | Complementary strand | 797699 | 798517 |
| JW0750(ybhE) | | 798672 | 799667 |
| JW0751(ybhD) | Complementary strand | 799708 | 800724 |
| JW0752(ybhH) | | 800845 | 801897 |
| JW0753(ybhI) | | 801973 | 803406 |
| JW0754(ybhJ) | | 803586 | 805850 |
| JW0755(ybhC) | Complementary strand | 806084 | 807367 |
| JW0756(ybhB) | Complementary strand | 807519 | 807995 |
| JW0757(bioA) | Complementary strand | 808054 | 809343 |
| JW0758(bioB) | | 809430 | 810470 |
| JW0759(bioF) | | 810467 | 811621 |
| JW0760(bioC) | | 811608 | 812363 |
| JW0761(bioD) | | 812356 | 813033 |
| JW0762(uvrB) | | 813612 | 815633 |
| JW0763(ybhK) | Complementary strand | 815825 | 816733 |
| JW0764(moaA) | | 817130 | 818119 |
| JW0765(moaB) | | 818141 | 818653 |
| JW0766(moaC) | | 818656 | 819141 |
| JW0767(moaD) | | 819134 | 819379 |
| JW0768(moaE) | | 819381 | 819833 |
| JW0769(ybhL) | | 819970 | 820674 |
| JW0770(ybhM) | | 820879 | 821592 |
| JW0771(ybhN) | Complementary strand | 821628 | 822584 |
| JW0772(ybhO) | Complementary strand | 822584 | 823825 |
| JW0773(ybhP) | Complementary strand | 823822 | 824583 |
| JW0774(ybhQ) | | 824716 | 825126 |
| JW0775(ybhR) | Complementary strand | 825088 | 825900 |
| JW0776(ybhR) | Complementary strand | 825837 | 826193 |
| JW0777(ybhS) | Complementary strand | 826204 | 827337 |
| JW0778(yhiG) | Complementary strand | 827330 | 829081 |
| JW0779(yhiI) | Complementary strand | 829059 | 830057 |
| JW0780(ybiH) | Complementary strand | 830057 | 830728 |
| JW0781(rhlE) | | 830957 | 832321 |
| JW0782(204#3.1) | | 832420 | 832566 |
| JW0783(ybiA) | Complementary strand | 832553 | 833035 |
| JW0784(dinG) | | 833155 | 835305 |
| JW0785(ybiB) | | 835333 | 836295 |
| JW0786(ybiC) | | 836436 | 837521 |
| JW0787(ybiJ) | Complementary strand | 837750 | 838010 |
| JW0788(ybiI) | Complementary strand | 838275 | 838541 |
| JW0789(ybiX) | Complementary strand | 838615 | 839328 |
| JW0790(ybiL) | Complementary strand | 839334 | 841616 |
| JW0791(ybiM) | Complementary strand | 841881 | 842285 |
| JW0792(ybiN) | | 842336 | 843343 |
| JW0793(ybiO) | Complementary strand | 843340 | 845700 |
| JW0794(glnQ) | Complementary strand | 845826 | 846548 |
| JW0795(glnP) | Complementary strand | 846545 | 847204 |
| JW0796(glnH) | Complementary strand | 847343 | 848089 |
| JW0797(dps) | Complementary strand | 848493 | 848996 |
| JW0798(ybiF) | Complementary strand | 849295 | 850182 |
| JW0799(ompX) | | 850535 | 851050 |
| JW0800(ybiP) | Complementary strand | 851099 | 852682 |
| JW0801(206#8) | | 853268 | 853735 |
| JW0802(ybiR) | | 853732 | 854850 |
| JW0803(yibS) | Complementary strand | 854909 | 855829 |
| JW0804(ybiT) | | 856048 | 857640 |
| JW0805(ybiU) | Complementary strand | 857881 | 859146 |
| JW0806(ybiV) | Complementary strand | 859298 | 860113 |
| JW0807(ybiW) | Complementary strand | 860259 | 862691 |
| JW0808(ybiY) | Complementary strand | 862697 | 863623 |
| JW0809(mipB) | | 863655 | 864389 |
| JW0810(moeB) | Complementary strand | 864465 | 865214 |
| JW0811(moeA) | Complementary strand | 865214 | 866449 |
| JW0812(ybiK) | | 866653 | 867618 |
| JW0813(yliA) | | 867497 | 869476 |
| JW0814(yliB) | | 869241 | 871034 |
| JW0815(yliC) | | 871052 | 871972 |
| JW0816(yliD) | | 871975 | 872886 |
| JW0817(209#3) | | 873064 | 875412 |
| JW0818(209#4) | | 875420 | 876748 |
| JW0819(yliG) | Complementary strand | 876795 | 878120 |
| JW0820(yliH) | | 878333 | 878716 |
| JW0821(yliI) | | 878827 | 879942 |
| JW0822(yliJ) | Complementary strand | 879939 | 880565 |
| JW0823(dacC) | | 880812 | 882014 |
| JW0824(deoR) | Complementary strand | 882061 | 882819 |
| JW0825(ybjG) | Complementary strand | 882877 | 883488 |
| JW0826(mdfA) | | 883758 | 884990 |
| JW0827(ybjH) | Complementary strand | 885031 | 885315 |
| JW0828(210#3) | Complementary strand | 885401 | 886219 |
| JW0829(210#4) | Complementary strand | 886216 | 887424 |
| JW0830(210#5) | | 887478 | 888044 |
| JW0831(210#6) | Complementary strand | 888219 | 889904 |
| JW0832(ybjM) | | 890174 | 890551 |
| JW0833(grxA) | Complementary strand | 890581 | 890838 |
| JW0834(ybjC) | | 890998 | 891285 |
| JW0835(mdaA) | | 891269 | 891991 |
| JW0836(rimK) | | 892052 | 892954 |
| JW0837(ybjN) | | 893042 | 893518 |
| JW0838(potF) | | 893869 | 894981 |
| JW0839(potG) | | 894995 | 896209 |
| JW0840(potH) | | 896219 | 897172 |
| JW0841(potI) | | 897169 | 898014 |
| JW0842(ybjO) | | 898074 | 898562 |
| JW0843(ybjF) | | 898603 | 899730 |
| JW0844(artJ) | Complementary strand | 899929 | 900660 |
| JW0845(artM) | Complementary strand | 900951 | 901619 |
| JW0846(artQ) | Complementary strand | 901619 | 902335 |
| JW0847(artI) | Complementary strand | 902342 | 903073 |
| JW0848(artP) | Complementary strand | 903091 | 903819 |
| JW0849(ybjP) | Complementary strand | 904037 | 904552 |
| JW0850(211#9) | | 904678 | 905001 |
| JW0851(211#10) | | 904998 | 905828 |
| JW0852(211#11) | Complementary strand | 905825 | 906874 |
| JW0853(ybjT) | Complementary strand | 906937 | 908442 |
| JW0854(ltaA) | Complementary strand | 908378 | 909379 |
| JW0855(poxB) | Complementary strand | 909416 | 911134 |
| JW0856(ybjV) | Complementary strand | 911267 | 912241 |
| JW0857(ybjW) | Complementary strand | 912247 | 913899 |
| JW0858(ybjE) | Complementary strand | 914043 | 914942 |
| JW0859(aqpZ) | Complementary strand | 915437 | 916132 |
| JW0860(ybjD) | | 916558 | 918216 |
| JW0861(ybjX) | Complementary strand | 918213 | 919205 |
| JW0862(213#3) | | 919320 | 920435 |
| JW0863(ybjZ) | | 920432 | 922378 |
| JW0864(cspD) | Complementary strand | 922451 | 922675 |
| JW0865(ylaJ) | | 922998 | 923318 |
| JW0866(clpA) | | 923349 | 925625 |
| JW0867(infA) | Complementary strand | 926310 | 926528 |
| JW0868(aat) | Complementary strand | 926813 | 927517 |
| JW0869(cydC) | Complementary strand | 927559 | 929280 |
| JW0870(cydD) | Complementary strand | 929281 | 931047 |
| JW0871(trxB) | Complementary strand | 931170 | 932135 |
| JW0872(lrp) | | 932680 | 933174 |
| JW0873(ftsK) | | 933309 | 937298 |
| JW0874(lolA) | | 937454 | 938068 |
| JW0875(ycaJ) | | 938079 | 939422 |
| JW0876(serS) | | 939513 | 940805 |
| JW0877(dmsA) | | 941131 | 943488 |
| JW0878(dmsB) | | 943499 | 944116 |
| JW0879(dmsC) | | 944118 | 944981 |
| JW0880(ycaC) | Complementary strand | 945016 | 945642 |
| JW0881(ycaD) | | 945956 | 947104 |
| JW0882(yjeM) | | 947122 | 948744 |
| JW0883(ycaN) | Complementary strand | 948745 | 949653 |
| JW0884(ycaK) | | 949753 | 950343 |
| JW0885(pflA) | Complementary strand | 950425 | 951165 |
| JW0886(pflB) | Complementary strand | 951357 | 953639 |
| JW0887(focA) | Complementary strand | 953694 | 954551 |
| JW0888(ycaO) | Complementary strand | 954957 | 956717 |
| JW0889(ycaP) | | 956847 | 957539 |
| JW0890(serC) | | 957738 | 958826 |
| JW0891(aroA) | | 958897 | 960180 |
| JW0892(ycaL) | | 960349 | 961113 |
| JW0893(cmk) | | 961286 | 961969 |
| JW0894(rpsA) | | 962080 | 963753 |
| JW0895(himD) | | 963913 | 964197 |
| JW0896(ycaI) | | 964327 | 966669 |
| JW0897(msbA) | | 966706 | 968454 |
| JW0898(lpxK) | | 968451 | 969437 |
| JW0899(ycaQ) | | 969474 | 970706 |
| JW0900(ycaR) | | 970758 | 970940 |
| JW0901(kdsB) | | 970937 | 971683 |
| JW0902(218#5) | | 971837 | 972730 |
| JW0903(ycbC) | Complementary strand | 972707 | 973486 |
| JW0904(smtA) | | 973622 | 974407 |
| JW0905(mukF) | | 974404 | 975726 |
| JW0906(kicA) | | 975734 | 976411 |
| JW0907(mukB) | | 976411 | 980871 |
| JW0908(ycbB) | | 981132 | 982979 |
| JW0909(ycbK) | | 983160 | 983708 |
| JW0910(ycbL) | | 983735 | 984382 |
| JW0911(aspC) | Complementary strand | 984604 | 985794 |
| JW0912(ompF) | Complementary strand | 985979 | 987067 |
| JW0913(asnS) | Complementary strand | 987670 | 989070 |
| JW0914(pncB) | Complementary strand | 989239 | 990441 |
| JW0915(pepN) | | 990707 | 993319 |
| JW0916(ssuB) | Complementary strand | 993362 | 994129 |
| JW0917(ssuC) | Complementary strand | 994126 | 994962 |
| JW0918(ssuD) | Complementary strand | 994928 | 996073 |
| JW0919(ssuA) | Complementary strand | 996070 | 997029 |
| JW0920(ssuE) | Complementary strand | 997022 | 997597 |
| JW0921(ycbQ) | | 997944 | 998492 |
| JW0922(ycbR) | | 998575 | 999276 |
| JW0923(ycbS) | | 999301 | 1001901 |
| JW0924(ycbT) | | 1001892 | 1002962 |
| JW0925(221#10) | | 1002974 | 1003516 |
| JW0926(221#11) | | 1003476 | 1004039 |
| JW0927(ycbF) | | 1004005 | 1004742 |
| JW0928(pyrD) | | 1004853 | 1005863 |
| JW0929(ycbW) | | 1006001 | 1006579 |
| JW0930(221#15) | Complementary strand | 1006576 | 1007643 |
| JW0931(ycbY) | | 1007929 | 1010037 |
| JW0932(uup) | | 1010049 | 1011956 |
| JW0933(pqiA) | | 1012086 | 1013339 |
| JW0934(pqiB) | | 1013344 | 1014984 |
| JW0935(ymbA) | | 1014981 | 1015544 |
| JW0936(rmf) | | 1015800 | 1015967 |
| JW0937(fabA) | Complementary strand | 1016037 | 1016555 |
| JW0938(222#8) | Complementary strand | 1016624 | 1018384 |
| JW0939(ycbG) | | 1018570 | 1019022 |
| JW0940(ompA) | Complementary strand | 1019098 | 1020138 |
| JW0941(sulA) | Complementary strand | 1020495 | 1021004 |
| JW0942(yccR) | | 1021223 | 1021852 |
| JW0943(yccS) | Complementary strand | 1021815 | 1023977 |
| JW0944(yccF) | Complementary strand | 1023987 | 1024433 |
| JW0945(helD) | | 1024556 | 1026610 |
| JW0946(mgsA) | Complementary strand | 1026642 | 1027109 |
| JW0947(223#9) | Complementary strand | 1027196 | 1027858 |
| JW0948(223#10) | | 1027977 | 1028444 |
| JW0949(yccV) | Complementary strand | 1028489 | 1028857 |
| JW0950(yccW) | Complementary strand | 1028864 | 1030054 |
| JW0951(acyP) | | 1029936 | 1030427 |
| JW0952(yccK) | Complementary strand | 1030424 | 1030753 |
| JW0953(yccA) | Complementary strand | 1030844 | 1031503 |
| JW0953.5(224#4) | Complementary strand | 1031705 | 1031881 |
| JW0954(hyaA) | | 1032224 | 1033342 |
| JW0955(hyaB) | | 1033339 | 1035132 |
| JW0956(hyaC) | | 1035151 | 1035858 |
| JW0957(hyaD) | | 1035855 | 1036442 |
| JW0958(hyaE) | | 1036439 | 1036837 |
| JW0959(hyaF) | | 1036834 | 1037691 |
| JW0960(appC) | | 1037825 | 1039369 |
| JW0961(appB) | | 1039381 | 1040517 |
| JW0962(yccB) | | 1040530 | 1040622 |
| JW0963(appA) | | 1040702 | 1042000 |
| JW0964(yccC) | Complementary strand | 1042115 | 1044295 |
| JW0965(yccY) | Complementary strand | 1044315 | 1044773 |
| JW0966(yccZ) | Complementary strand | 1044749 | 1045888 |
| JW0967(ymcA) | Complementary strand | 1045934 | 1048030 |
| JW0968(ymcB) | Complementary strand | 1048030 | 1048776 |
| JW0969(ymcC) | Complementary strand | 1048773 | 1049417 |
| JW0970(ymcD) | Complementary strand | 1049524 | 1049847 |
| JW0971(insA) | | 1049918 | 1050193 |
| JW0972(insB) | | 1050112 | 1050615 |
| JW0973(cspH) | Complementary strand | 1051048 | 1051248 |
| JW0974(cspG) | | 1051546 | 1051758 |
| JW0975(sfa) | | 1051932 | 1052162 |
| JW0976(yccL) | | 1052152 | 1052325 |
| JW0977(yccM) | Complementary strand | 1052374 | 1053447 |
| JW0978(torS) | Complementary strand | 1053519 | 1056233 |
| JW0979(torT) | | 1056346 | 1057374 |
| JW0980(torR) | Complementary strand | 1057347 | 1058039 |
| JW0981(torC) | | 1058169 | 1059341 |
| JW0982(torA) | | 1059341 | 1061887 |
| JW0983(torD) | | 1061884 | 1062483 |
| JW0984(yccD) | Complementary strand | 1062635 | 1062940 |
| JW0985(cbpA) | Complementary strand | 1062940 | 1063860 |
| JW0986(yccE) | | 1064121 | 1065377 |
| JW0987(agp) | | 1065670 | 1066911 |
| JW0988(yccJ) | Complementary strand | 1066949 | 1067176 |
| JW0989(wrbA) | Complementary strand | 1067197 | 1067793 |
| JW0990(yciG) | | 1068136 | 1068339 |
| JW0991(ycdG) | Complementary strand | 1068596 | 1069990 |
| JW0992(228#5) | Complementary strand | 1069945 | 1070520 |
| JW0993(228#6) | Complementary strand | 1070450 | 1071040 |
| JW0994(228#7) | Complementary strand | 1071050 | 1071850 |
| JW0995(ycdK) | Complementary strand | 1071858 | 1072244 |
| JW0996(228#9) | Complementary strand | 1072256 | 1072951 |
| JW0997(228#10) | Complementary strand | 1072948 | 1074096 |
| JW0998(ycdC) | | 1074327 | 1074965 |
| JW0999(putA) | Complementary strand | 1075005 | 1078967 |
| JW1000(yzpU) | Complementary strand | 1079119 | 1079310 |
| JW1001(putP) | | 1079390 | 1080898 |
| JW1002(229#1) | | 1081539 | 1082270 |
| JW1003(ycdO) | | 1082328 | 1083455 |
| JW1004(ycdB) | | 1083461 | 1084732 |
| JW1005(phoH) | | 1085077 | 1086141 |
| JW1006(ycdP) | Complementary strand | 1086191 | 1086604 |
| JW1007(ycdQ) | Complementary strand | 1086606 | 1087931 |
| JW1008(ycdR) | Complementary strand | 1087924 | 1088235 |
| JW1009(ycdR) | Complementary strand | 1088400 | 1089941 |
| JW1010(ycdS) | Complementary strand | 1089950 | 1092373 |
| JW1011(ycdT) | | 1092888 | 1094318 |
| JW1012(230#3) | Complementary strand | 1094359 | 1095225 |
| JW1013(230#3.1) | Complementary strand | 1095222 | 1095521 |
| JW1014(230#4) | | 1095607 | 1095930 |
| JW1015(ycdU) | | 1095927 | 1096913 |
| JW1016(ycdW) | | 1097789 | 1098727 |
| JW1017(ycdX) | | 1098782 | 1099519 |
| JW1018(ycdY) | | 1099543 | 1100097 |
| JW1019(ycdZ) | | 1100151 | 1100690 |
| JW1020(csgG) | Complementary strand | 1100754 | 1101587 |
| JW1021(csgF) | Complementary strand | 1101614 | 1102030 |
| JW1022(csgE) | Complementary strand | 1102055 | 1102444 |
| JW1023(csgD) | Complementary strand | 1102449 | 1103099 |
| JW1024(csgB) | | 1103854 | 1104309 |
| JW1025(csgA) | | 1104350 | 1104805 |
| JW1026(csgC) | | 1104864 | 1105196 |
| JW1027(yi22) | Complementary strand | 1105295 | 1106200 |
| JW1028(yi24) | | 1105724 | 1106155 |
| JW1029(yi23) | Complementary strand | 1105834 | 1106127 |
| JW1030(yi2A) | Complementary strand | 1106158 | 1106568 |
| JW1031(sfaA) | | 1106653 | 1106964 |
| JW1032(232#3) | | 1107059 | 1107592 |
| JW1033(ymdC) | | 1107534 | 1109015 |
| JW1034(ymdD) | Complementary strand | 1109023 | 1110180 |
| JW1035(mdoG) | | 1110574 | 1112109 |
| JW1036(232#7) | Complementary strand | 1110676 | 1110933 |
| JW1037(mdoH) | | 1112102 | 1114645 |
| JW1038(yceK) | | 1114842 | 1115045 |
| JW1039(msyB) | Complementary strand | 1115046 | 1115420 |
| JW1040(yceE) | Complementary strand | 1115503 | 1116729 |
| JW1041(htrB) | Complementary strand | 1116901 | 1117821 |
| JW1042(yceA) | | 1118046 | 1119098 |
| JW1043(yceI) | Complementary strand | 1119140 | 1119715 |
| JW1044(233#6) | Complementary strand | 1119719 | 1120285 |
| JW1045(233#6.1) | Complementary strand | 1120546 | 1120686 |
| JW1046(solA) | Complementary strand | 1120707 | 1121825 |
| JW1047(yceP) | Complementary strand | 1121940 | 1122197 |
| JW1048(dinI) | Complementary strand | 1122481 | 1122726 |
| JW1049(pyrC) | Complementary strand | 1122800 | 1123846 |
| JW1050(yceB) | Complementary strand | 1123952 | 1124512 |
| JW1051(grxB) | Complementary strand | 1124646 | 1125293 |
| JW1052(yqjV) | Complementary strand | 1125357 | 1126565 |
| JW1053(rimJ) | | 1126801 | 1127385 |
| JW1054(yceH) | | 1127396 | 1128043 |
| JW1055(mviM) | | 1128045 | 1128968 |
| JW1056(mviN) | | 1129078 | 1130613 |
| JW1057(flgN) | Complementary strand | 1130653 | 1131069 |
| JW1058(flgM) | Complementary strand | 1131074 | 1131367 |
| JW1059(flgA) | Complementary strand | 1131443 | 1132102 |
| JW1060(flgB) | | 1132257 | 1132673 |
| JW1061(flgC) | | 1132677 | 1133081 |
| JW1062(flgD) | | 1133093 | 1133788 |
| JW1063(flgE) | | 1133813 | 1135021 |
| JW1064(flgF) | | 1135041 | 1135796 |
| JW1065(flgG) | | 1135968 | 1136750 |
| JW1066(flgH) | | 1136794 | 1137501 |
| JW1067(flgI) | | 1137513 | 1138610 |
| JW1068(flgJ) | | 1138610 | 1139551 |
| JW1069(flgK) | | 1139617 | 1141260 |
| JW1070(flgL) | | 1141272 | 1142225 |
| JW1071(rne) | Complementary strand | 1142421 | 1145606 |
| JW1072(rluC) | | 1146179 | 1147138 |
| JW1073(yceF) | Complementary strand | 1147250 | 1147873 |
| JW1074(yceD) | | 1148033 | 1148554 |
| JW1075(rpmF) | | 1148606 | 1148779 |
| JW1076(plsX) | | 1148890 | 1149930 |
| JW1077(fabH) | | 1149998 | 1150951 |
| JW1078(fabD) | | 1150967 | 1151896 |
| JW1079(fabG) | | 1151909 | 1152643 |
| JW1080(acpP) | | 1152854 | 1153090 |
| JW1081(fabF) | | 1153178 | 1154419 |
| JW1082(pabC) | | 1154539 | 1155348 |
| JW1083(yceG) | | 1155351 | 1156373 |
| JW1084(tmk) | | 1156363 | 1157004 |
| JW1085(holB) | | 1157001 | 1158005 |
| JW1086(ycfH) | | 1158016 | 1158813 |
| JW1087(ptsG) | | 1159108 | 1160541 |
| JW1088(fhuE) | Complementary strand | 1160601 | 1162790 |
| JW1089(ycfF) | | 1163124 | 1163483 |
| JW1090(ycfL) | | 1163486 | 1163863 |
| JW1091(ycfM) | | 1163874 | 1164518 |
| JW1092(ycfN) | | 1164499 | 1165323 |
| JW1093(nagZ) | | 1165334 | 1166359 |
| JW1094(ycfP) | | 1166325 | 1166924 |
| JW1095(ndh) | | 1167324 | 1168628 |
| JW1096(ycfJ) | | 1168838 | 1169377 |
| JW1097(ycfQ) | Complementary strand | 1169439 | 1170149 |
| JW1098(ycfR) | | 1170312 | 1170569 |
| JW1099(ycfS) | Complementary strand | 1170651 | 1171613 |
| JW1100(mfd) | Complementary strand | 1171757 | 1175203 |
| JW1101(ycfT) | Complementary strand | 1175331 | 1176404 |
| JW1102(ycfU) | | 1176615 | 1177865 |
| JW1103(ycfV) | | 1177720 | 1178559 |
| JW1104(ycfW) | | 1178559 | 1179803 |
| JW1105(ycfX) | | 1179832 | 1180743 |
| JW1106(238#9) | | 1180759 | 1181598 |
| JW1107(cobB) | Complementary strand | 1181718 | 1182506 |
| JW1108(ymfA) | Complementary strand | 1182503 | 1182973 |
| JW1109(potD) | Complementary strand | 1183022 | 1184068 |
| JW1110(potC) | Complementary strand | 1184065 | 1184859 |
| JW1111(potB) | Complementary strand | 1184856 | 1185683 |
| JW1112(potA) | Complementary strand | 1185697 | 1186833 |
| JW1113(pepT) | | 1187083 | 1188309 |
| JW1114(ycfD) | Complementary strand | 1188358 | 1189479 |
| JW1115(phoQ) | Complementary strand | 1189555 | 1191015 |
| JW1116(phoP) | Complementary strand | 1191015 | 1191686 |
| JW1117(purB) | Complementary strand | 1191855 | 1193225 |
| JW1118(ycfC) | Complementary strand | 1193229 | 1193876 |
| JW1119(trmU) | Complementary strand | 1193906 | 1195012 |
| JW1120(ymfB) | Complementary strand | 1195066 | 1195527 |
| JW1121(ymfC) | Complementary strand | 1195537 | 1196190 |
| JW1122(icdA) | | 1196362 | 1197612 |
| JW1123(ymfD) | Complementary strand | 1198106 | 1198771 |
| JW1124(ymfE) | Complementary strand | 1198772 | 1199485 |
| JW1125(lit) | | 1199934 | 1200827 |
| JW1126(intE) | Complementary strand | 1200918 | 1202045 |
| JW1127(VXIS_BPP21) | Complementary strand | 1202026 | 1202271 |
| JW1128(ymfH) | Complementary strand | 1202308 | 1202619 |
| JW1129(ymfI) | | 1202691 | 1203077 |
| JW1130(ymfJ) | Complementary strand | 1203015 | 1203323 |
| JW1131(RPC2_BPP22) | Complementary strand | 1203498 | 1204172 |
| JW1132(241#2) | | 1203960 | 1204463 |
| JW1133(ymfL) | | 1204495 | 1205064 |
| JW1134(ymfM) | | 1205061 | 1205399 |
| JW1135(ymfN) | | 1205409 | 1206776 |
| JW1136(ymfR) | | 1206788 | 1206970 |
| JW1137(ymfO) | | 1206970 | 1207443 |
| JW1138(241#8) | | 1207331 | 1208161 |
| JW1139(241#9) | | 1208152 | 1208736 |
| JW1140(ycfK) | | 1208740 | 1209369 |
| JW1141(ymfS) | | 1209152 | 1209784 |
| JW1142(ycfA) | Complementary strand | 1209756 | 1210358 |
| JW1143(ycfE) | Complementary strand | 1210358 | 1210897 |
| JW1144(pin) | | 1210924 | 1211478 |
| JW1145(mcrA) | | 1211585 | 1212418 |
| JW1146(241#16) | | 1212652 | 1212816 |
| JW1147(ycgW) | Complementary strand | 1212919 | 1213242 |
| JW1148(ycgX) | Complementary strand | 1213942 | 1214346 |
| JW1149(ycgE) | Complementary strand | 1214567 | 1215298 |
| JW1150(242#1) | Complementary strand | 1215503 | 1216714 |
| JW1151(ycgZ) | | 1217028 | 1217264 |
| JW1152(ymgA) | | 1217307 | 1217579 |
| JW1153(242#1.4) | | 1217608 | 1217874 |
| JW1154(ymgC) | | 1217987 | 1218235 |
| JW1155(yahA) | | 1218525 | 1220090 |
| JW1156(243#0.1) | | 1220222 | 1220440 |
| JW1157(243#1) | | 1220840 | 1222360 |
| JW1158(aidA) | | 1222427 | 1223461 |
| JW1159(ymgD) | Complementary strand | 1223544 | 1223879 |
| JW1160(243#4) | Complementary strand | 1223883 | 1224227 |
| JW1161(243#5) | | 1224737 | 1224925 |
| JW1162(243#5.1) | | 1224934 | 1225146 |
| JW1163(minE) | Complementary strand | 1225518 | 1225784 |
| JW1164(minD) | Complementary strand | 1225788 | 1226600 |
| JW1165(minC) | Complementary strand | 1226624 | 1227319 |
| JW1166(ycgJ) | | 1227839 | 1228207 |
| JW1167(ycgK) | Complementary strand | 1228310 | 1228711 |
| JW1168(ycgL) | | 1228920 | 1229246 |
| JW1169(243#12) | | 1229318 | 1229977 |
| JW1170(ycgN) | | 1230039 | 1230515 |
| JW1171(clyA) | Complementary strand | 1230722 | 1231639 |
| JW1172(umuD) | | 1232006 | 1232425 |
| JW1173(umuC) | | 1232425 | 1233693 |
| JW1174(dsbB) | Complementary strand | 1233739 | 1234275 |
| JW1175(nhaB) | Complementary strand | 1234415 | 1235956 |
| JW1176(fadR) | | 1236177 | 1236896 |
| JW1177(ycgB) | Complementary strand | 1236948 | 1238480 |
| JW1178(dadA) | | 1238810 | 1240108 |
| JW1179(dadX) | | 1240118 | 1241188 |
| JW1180(ycgO) | Complementary strand | 1241574 | 1243184 |
| JW1181(ldcA) | Complementary strand | 1243405 | 1244319 |
| JW1182(mltE) | | 1244305 | 1245030 |
| JW1183(ycgR) | Complementary strand | 1245032 | 1245766 |
| JW1184(tag1) | | 1245967 | 1246221 |
| JW1185(ycgY) | | 1246399 | 1246839 |
| JW1186(treA) | Complementary strand | 1246918 | 1248615 |
| JW1187(is5B) | Complementary strand | 1248821 | 1249837 |
| JW1188(yi51) | | 1249157 | 1249525 |
| JW1189(ycgC) | Complementary strand | 1250134 | 1251555 |
| JW1190(ycgS) | Complementary strand | 1251563 | 1252270 |
| JW1191(ycgT) | Complementary strand | 1252206 | 1253306 |
| JW1192(dhaR) | | 1253495 | 1255423 |
| JW1193(246#4) | Complementary strand | 1255523 | 1258390 |
| JW1194(ychF) | Complementary strand | 1259159 | 1260250 |
| JW1195(pth) | Complementary strand | 1260367 | 1260951 |
| JW1196(ychH) | | 1261229 | 1261507 |
| JW1197(ychM) | Complementary strand | 1261562 | 1262887 |
| JW1198(prsA) | Complementary strand | 1263366 | 1264313 |
| JW1199(ychB) | Complementary strand | 1264464 | 1265315 |
| JW1200(hemM) | Complementary strand | 1265315 | 1265938 |
| JW1201(hemA) | | 1266152 | 1267408 |
| JW1202(prfA) | | 1267450 | 1268532 |
| JW1203(hemK) | | 1268532 | 1269365 |
| JW1204(248#3) | | 1269362 | 1269754 |
| JW1205(ychA) | | 1269758 | 1270567 |
| JW1206(kdsA) | | 1270603 | 1271457 |
| JW1207(chaA) | Complementary strand | 1273187 | 1274287 |
| JW1208(chaB) | | 1274557 | 1274787 |
| JW1209(chaC) | | 1274924 | 1275640 |
| JW1210(ychN) | Complementary strand | 1275684 | 1276037 |
| JW1211(ychO) | | 1276363 | 1277616 |
| JW1212(narL) | Complementary strand | 1277617 | 1278267 |
| JW1213(narX) | Complementary strand | 1278260 | 1280056 |
| JW1214(narK) | | 1280395 | 1281786 |
| JW1215(narG) | | 1282302 | 1286045 |
| JW1216(narH) | | 1286042 | 1287580 |
| JW1217(narJ) | | 1287577 | 1288287 |
| JW1218(narI) | | 1288287 | 1288964 |
| JW1219(tpr) | Complementary strand | 1289525 | 1289626 |
| JW1220(purU) | Complementary strand | 1290220 | 1291062 |
| JW1221(ychJ) | Complementary strand | 1291112 | 1291570 |
| JW1222(ychK) | | 1291644 | 1292588 |
| JW1223(sprE) | | 1292680 | 1293693 |
| JW1224(galU) | | 1293895 | 1294803 |
| JW1225(hns) | Complementary strand | 1294947 | 1295360 |
| JW1226(tdk) | | 1295965 | 1296582 |
| JW1227(ychG) | Complementary strand | 1296864 | 1297454 |
| JW1227.5(251#6) | Complementary strand | 1297406 | 1297636 |
| JW1228(adhE) | Complementary strand | 1297884 | 1300559 |
| JW1229(ychE) | | 1301036 | 1301683 |
| JW1230(yi2A) | | 1301946 | 1302356 |
| JW1231(yi22) | | 1302314 | 1303219 |
| JW1232(yi24) | Complementary strand | 1302359 | 1302790 |
| JW1233(yi23) | | 1302387 | 1302680 |
| JW1234(251#8.5) | Complementary strand | 1303144 | 1303491 |
| JW1235(oppA) | | 1303757 | 1305388 |
| JW1236(oppB) | | 1305474 | 1306394 |
| JW1237(oppC) | | 1306409 | 1307317 |
| JW1238(oppD) | | 1307329 | 1308342 |
| JW1239(oppF) | | 1308339 | 1309343 |
| JW1240(yciU) | Complementary strand | 1309396 | 1309725 |
| JW1241(cls) | Complementary strand | 1309760 | 1311220 |
| JW1242(kch) | Complementary strand | 1311591 | 1312844 |
| JW1243(yciI) | Complementary strand | 1313144 | 1313440 |
| JW1244(tonB) | | 1313649 | 1314383 |
| JW1245(yciA) | Complementary strand | 1314423 | 1314821 |
| JW1246(yciB) | Complementary strand | 1314926 | 1315465 |
| JW1247(yciC) | Complementary strand | 1315495 | 1316238 |
| JW1248(yciD) | | 1316595 | 1317233 |
| JW1249(yciE) | Complementary strand | 1317293 | 1317799 |
| JW1250(yciF) | Complementary strand | 1317845 | 1318345 |
| JW1251(yciG) | Complementary strand | 1318431 | 1318610 |
| JW1252(trpA) | Complementary strand | 1318991 | 1319797 |
| JW1253(trpB) | Complementary strand | 1319797 | 1320990 |
| JW1254(trpC) | Complementary strand | 1321002 | 1322360 |
| JW1255(trpD) | Complementary strand | 1322364 | 1323959 |
| JW1256(trpE) | Complementary strand | 1323959 | 1325521 |
| JW1257(trpL) | Complementary strand | 1325613 | 1325657 |
| JW1258(yciV) | | 1325795 | 1326676 |
| JW1259(yciO) | | 1326637 | 1327293 |
| JW1260(yciQ) | | 1327465 | 1329216 |
| JW1261(yciL) | | 1329427 | 1330302 |
| JW1262(btuR) | Complementary strand | 1330342 | 1330932 |
| JW1263(yciK) | Complementary strand | 1330929 | 1331687 |
| JW1264(sohB) | | 1331907 | 1332956 |
| JW1265(yciN) | Complementary strand | 1332992 | 1333243 |
| JW1266(topA) | | 1333623 | 1336220 |
| JW1267(cysB) | | 1336430 | 1337404 |
| JW1268(acnA) | | 1338406 | 1341081 |
| JW1269(ribA) | Complementary strand | 1341145 | 1341735 |
| JW1270(pgpB) | | 1341905 | 1342669 |
| JW1271(yciS) | | 1342818 | 1343126 |
| JW1272(yciM) | | 1343133 | 1344302 |
| JW1273(pyrF) | | 1344496 | 1345233 |
| JW1274(yciH) | | 1345233 | 1345559 |
| JW1275(osmB) | Complementary strand | 1345685 | 1345903 |
| JW1276(yciT) | Complementary strand | 1346172 | 1346921 |
| JW1277(256#1) | Complementary strand | 1347011 | 1347193 |
| JW1278(yciR) | Complementary strand | 1347332 | 1349317 |
| JW1279(rnb) | Complementary strand | 1349553 | 1351487 |
| JW1280(yciW) | Complementary strand | 1351555 | 1352760 |
| JW1281(envM) | Complementary strand | 1352826 | 1353614 |
| JW1282(ycjD) | Complementary strand | 1353982 | 1354335 |
| JW1283(sapF) | Complementary strand | 1354403 | 1355209 |
| JW1284(sapD) | Complementary strand | 1355211 | 1356203 |
| JW1285(sapC) | Complementary strand | 1356203 | 1357093 |
| JW1286(sapB) | Complementary strand | 1357080 | 1358045 |
| JW1287(sapA) | Complementary strand | 1358042 | 1359685 |
| JW1288(ymjA) | Complementary strand | 1359998 | 1360243 |
| JW1289(yeeF) | Complementary strand | 1360377 | 1361762 |
| JW1290(ycjK) | Complementary strand | 1362065 | 1363561 |
| JW1291(ycjL) | | 1363695 | 1364459 |
| JW1292(ycjC) | | 1364486 | 1365043 |
| JW1293(aldH) | | 1365318 | 1366805 |
| JW1294(ordL) | | 1366807 | 1368087 |
| JW1295(goaG) | | 1368125 | 1369390 |
| JW1296(pspF) | Complementary strand | 1369510 | 1370487 |
| JW1297(pspA) | | 1370654 | 1371322 |
| JW1298(pspB) | | 1371376 | 1371600 |
| JW1299(pspC) | | 1371600 | 1371959 |
| JW1300(pspD) | | 1371968 | 1372189 |
| JW1301(pspE) | | 1372264 | 1372578 |
| JW1302(sucP) | | 1372791 | 1374470 |
| JW1303(258#8) | | 1374484 | 1375776 |
| JW1304(ycjO) | | 1375797 | 1376678 |
| JW1305(ycjP) | | 1376665 | 1377507 |
| JW1306(ycjQ) | | 1377538 | 1378590 |
| JW1307(259#3) | | 1378600 | 1379397 |
| JW1308(ycjS) | | 1379407 | 1380462 |
| JW1309(ycjT) | | 1380459 | 1382726 |
| JW1310(ycjU) | | 1382723 | 1383382 |
| JW1311(ycjV) | | 1383396 | 1384364 |
| JW1312(ompG) | | 1384522 | 1385427 |
| JW1313(ycjW) | Complementary strand | 1385538 | 1386536 |
| JW1314(ycjX) | | 1386692 | 1388089 |
| JW1315(ycjF) | | 1388086 | 1389147 |
| JW1316(tyrR) | | 1389295 | 1390836 |
| JW1317(tpx) | Complementary strand | 1390880 | 1391386 |
| JW1318(ycjG) | | 1391505 | 1392470 |
| JW1319(ycjI) | Complementary strand | 1392445 | 1393233 |
| JW1319.5(260#10) | Complementary strand | 1393255 | 1393437 |
| JW1320(ycjY) | Complementary strand | 1393508 | 1394440 |
| JW1321(ycjZ) | | 1394566 | 1395465 |
| JW1321.5(261#1.1) | | 1395554 | 1395679 |
| JW1322(mppA) | | 1395802 | 1397415 |
| JW1323(ynaI) | Complementary strand | 1397466 | 1398497 |
| JW1324(is5B) | | 1398651 | 1399667 |
| JW1325(yi51) | Complementary strand | 1398963 | 1399331 |
| JW1326(ynaJ) | | 1399940 | 1400197 |
| JW1327(ydaA) | Complementary strand | 1400247 | 1401197 |
| JW1328(fnr) | Complementary strand | 1401349 | 1402101 |
| JW1329(ogt) | Complementary strand | 1402296 | 1402811 |
| JW1330(ydaH) | Complementary strand | 1402822 | 1404354 |
| JW1331(261#9) | Complementary strand | 1404385 | 1405830 |
| JW1332(ydaJ) | Complementary strand | 1405830 | 1407155 |
| JW1333(262#1) | | 1407316 | 1408224 |
| JW1334(ydaL) | | 1408554 | 1409117 |
| JW1335(262#3) | Complementary strand | 1409138 | 1410430 |
| JW1336(262#4) | | 1410625 | 1411608 |
| JW1336.5(262#5) | | 1411883 | 1412056 |
| JW1337(dbpA) | | 1412086 | 1413459 |
| JW1338(ydaO) | Complementary strand | 1413588 | 1414523 |
| JW1339(intR) | Complementary strand | 1414575 | 1415810 |
| JW1340(ydaQ) | Complementary strand | 1415812 | 1416051 |
| JW1341(ydaC) | Complementary strand | 1416106 | 1416315 |
| JW1342(lar) | Complementary strand | 1416308 | 1416541 |
| JW1343(recT) | Complementary strand | 1416559 | 1417368 |
| JW1344(recE) | Complementary strand | 1417361 | 1419961 |
| JW1345(racC) | Complementary strand | 1420063 | 1420338 |
| JW1346(ydaE) | Complementary strand | 1420413 | 1420583 |
| JW1347(kil) | Complementary strand | 1420583 | 1420804 |
| JW1348(sieB) | | 1421123 | 1421734 |
| JW1349(ydaF) | Complementary strand | 1421731 | 1421886 |
| JW1350(263#6.1) | Complementary strand | 1421897 | 1422076 |
| JW1351(racR) | Complementary strand | 1422340 | 1422816 |
| JW1352(263#6.3) | | 1422940 | 1423236 |
| JW1353(ydaT) | | 1423259 | 1423681 |
| JW1354(ydaU) | | 1423694 | 1424551 |
| JW1355(dnaC) | | 1424558 | 1425304 |
| JW1356(ydaW) | | 1425276 | 1425887 |
| JW1357(enpP) | | 1425914 | 1426219 |
| JW1358(trkG) | | 1426357 | 1427814 |
| JW1359(ynaK) | | 1427952 | 1428215 |
| JW1360(ydaY) | | 1428196 | 1428555 |
| JW1361(VMTH_LAMBD) | | 1429029 | 1430057 |
| JW1362(VLOM_LAMBD) | | 1430033 | 1430188 |
| JW1363(is5B) | Complementary strand | 1430321 | 1431301 |
| JW1364(yi51) | | 1430657 | 1431025 |
| JW1365(VLOM_LAMBD) | | 1431098 | 1431559 |
| JW1366(Y401_LAMBD) | | 1431624 | 1434986 |
| JW1367(yzzL) | | 1434986 | 1435561 |
| JW1368(tnpO) | Complementary strand | 1435659 | 1436249 |
| JW1369(ynaE) | Complementary strand | 1436566 | 1436832 |
| JW1370(upo3) | Complementary strand | 1437760 | 1438194 |
| JW1371(ompN) | Complementary strand | 1438335 | 1439468 |
| JW1372(nifJ) | Complementary strand | 1439835 | 1443359 |
| JW1373(ydbd) | | 1443744 | 1443899 |
| JW1374(hslJ) | Complementary strand | 1443896 | 1444318 |
| JW1375(ldhA) | Complementary strand | 1444429 | 1445418 |
| JW1376(ydbH) | | 1445626 | 1448265 |
| JW1377(ynbE) | | 1448262 | 1448447 |
| JW1378(ydbL) | | 1448374 | 1448781 |
| JW1379(feaR) | Complementary strand | 1448953 | 1449858 |
| JW1380(feaB) | | 1450094 | 1451593 |
| JW1381(tynA) | Complementary strand | 1451651 | 1453924 |
| JW1382(paaZ) | Complementary strand | 1454172 | 1456217 |
| JW1383(paaA) | | 1456502 | 1457431 |
| JW1384(paaB) | | 1457443 | 1457730 |
| JW1385(paaC) | | 1457739 | 1458485 |
| JW1386(paaD) | | 1458494 | 1458997 |
| JW1387(paaE) | | 1459005 | 1460075 |
| JW1388(paaF) | | 1460072 | 1460839 |
| JW1389(paaG) | | 1460839 | 1461627 |
| JW1390(paaH) | | 1461629 | 1463056 |
| JW1391(paaI) | | 1463046 | 1463468 |
| JW1392(paaJ) | | 1463468 | 1464673 |
| JW1393(paaK) | | 1464670 | 1466013 |
| JW1394(paaX) | | 1466114 | 1467064 |
| JW1395(paaY) | | 1467046 | 1467636 |
| JW1396(ydbA) | | 1467967 | 1470525 |
| JW1397(yi22) | Complementary strand | 1470496 | 1471401 |
| JW1398(yi24) | | 1470925 | 1471356 |
| JW1399(yi23) | Complementary strand | 1471035 | 1471328 |
| JW1400(yi2A) | Complementary strand | 1471359 | 1471769 |
| JW1401(268#0.5) | | 1471933 | 1473084 |
| JW1402(ydbB) | | 1473265 | 1476588 |
| JW1403(ydbC) | | 1476796 | 1477656 |
| JW1404(ydbD) | | 1477713 | 1480025 |
| JW1405(269#1) | | 1480196 | 1480801 |
| JW1406(ynbB) | | 1480801 | 1481697 |
| JW1407(269#3) | | 1481713 | 1483470 |
| JW1408(ynbD) | | 1483484 | 1484776 |
| JW1409(acpD) | Complementary strand | 1484830 | 1485435 |
| JW1410(hrpA) | | 1485693 | 1489538 |
| JW1411(ydcF) | | 1489810 | 1490610 |
| JW1412(aldA) | | 1490807 | 1492246 |
| JW1413(gapC) | Complementary strand | 1492288 | 1492539 |
| JW1414(gapC) | Complementary strand | 1492536 | 1492940 |
| JW1415(cybB) | | 1493441 | 1494007 |
| JW1416(ydcA) | | 1494252 | 1494425 |
| JW1416.5(271#2) | | 1494569 | 1494721 |
| JW1417(trg) | | 1495045 | 1496685 |
| JW1418(ydcI) | Complementary strand | 1496723 | 1497787 |
| JW1419(271#5) | | 1497863 | 1499206 |
| JW1420(ydcG) | | 1499461 | 1501086 |
| JW1421(271#7) | Complementary strand | 1501007 | 1501198 |
| JW1422(ydcH) | | 1501283 | 1501450 |
| JW1423(rimL) | | 1501513 | 1502052 |
| JW1424(271#10) | Complementary strand | 1502044 | 1503024 |
| JW1425(tehA) | | 1503148 | 1504140 |
| JW1426(tehB) | | 1504137 | 1504730 |
| JW1427(272#1) | | 1505032 | 1505700 |
| JW1427.5(272#2) | Complementary strand | 1505937 | 1506224 |
| JW1428(272#3) | | 1506292 | 1507440 |
| JW1429(272#4) | Complementary strand | 1507480 | 1508778 |
| JW1430(272#5) | | 1508747 | 1509283 |
| JW1431(prtC) | | 1509356 | 1511317 |
| JW1432(yncJ) | Complementary strand | 1511409 | 1511639 |
| JW1433(ydcQ) | | 1512062 | 1512499 |
| JW1434(yjiR) | | 1512578 | 1513984 |
| JW1435(273#4) | | 1514229 | 1515374 |
| JW1436(potA) | | 1515392 | 1516405 |
| JW1437(273#6) | | 1516406 | 1517347 |
| JW1438(potC) | | 1517337 | 1518131 |
| JW1439(ydcW) | | 1518153 | 1519577 |
| JW1440(ydcX) | | 1519889 | 1520137 |
| JW1441(ydcY) | | 1520223 | 1520456 |
| JW1442(ydcZ) | Complementary strand | 1520457 | 1520906 |
| JW1443(274#1) | Complementary strand | 1520903 | 1521655 |
| JW1444(yncB) | | 1521578 | 1522639 |
| JW1445(yncC) | | 1522837 | 1523502 |
| JW1446(yncD) | Complementary strand | 1523538 | 1525640 |
| JW1447(274#5) | | 1525882 | 1526943 |
| JW1448(ansP) | Complementary strand | 1527056 | 1528606 |
| JW1449(275#2) | | 1528822 | 1529439 |
| JW1450(275#2.1) | | 1529602 | 1529727 |
| JW1451(rhsE) | | 1530465 | 1532513 |
| JW1452(ydcD) | | 1532497 | 1532979 |
| JW1453(yhhI) | | 1533161 | 1533907 |
| JW1454(276#2.1) | | 1534026 | 1534151 |
| JW1455(ydcC) | | 1534391 | 1535527 |
| JW1456(ydcE) | | 1535627 | 1535860 |
| JW1457(yddH) | Complementary strand | 1535857 | 1536426 |
| JW1458(nhoA) | | 1536599 | 1537444 |
| JW1459(yddE) | Complementary strand | 1537540 | 1538433 |
| JW1460(narV) | Complementary strand | 1538512 | 1539192 |
| JW1461(narW) | Complementary strand | 1539189 | 1539884 |
| JW1462(narY) | Complementary strand | 1539884 | 1541428 |
| JW1463(narZ) | Complementary strand | 1541425 | 1545165 |
| JW1464(narU) | Complementary strand | 1545247 | 1546635 |
| JW1465(277#1.1) | | 1545457 | 1545627 |
| JW1466(yddJ) | Complementary strand | 1546959 | 1547294 |
| JW1467(yddK) | Complementary strand | 1547333 | 1548289 |
| JW1468(277#2) | Complementary strand | 1548313 | 1548603 |
| JW1469(yddG) | Complementary strand | 1548863 | 1549687 |
| JW1470(fdnG) | | 1549976 | 1553023 |
| JW1471(fdnH) | | 1553036 | 1553920 |
| JW1472(fdnI) | | 1553913 | 1554566 |
| JW1473(yddM) | Complementary strand | 1554973 | 1555335 |
| JW1474(adhP) | Complementary strand | 1555403 | 1556413 |
| JW1475(sfcA) | Complementary strand | 1556547 | 1558271 |
| JW1475.1(rpsV) | Complementary strand | 1558401 | 1558538 |
| JW1476(yddX) | Complementary strand | 1558640 | 1558918 |
| JW1477(osmC) | | 1559200 | 1559631 |
| JW1478(yddO) | Complementary strand | 1559687 | 1560613 |
| JW1479(yddP) | Complementary strand | 1560606 | 1561592 |
| JW1480(yddQ) | Complementary strand | 1561589 | 1562485 |
| JW1481(yddR) | Complementary strand | 1562482 | 1563504 |
| JW1482(yddS) | Complementary strand | 1563506 | 1565194 |
| JW1483(280#1) | Complementary strand | 1565070 | 1565651 |
| JW1484(dos) | Complementary strand | 1565909 | 1568308 |
| JW1485(280#3) | Complementary strand | 1568333 | 1569715 |
| JW1486(280#4) | Complementary strand | 1570079 | 1571398 |
| JW1487(xasA) | Complementary strand | 1571529 | 1573064 |
| JW1488(gadB) | Complementary strand | 1573220 | 1574620 |
| JW1489(pqqL) | Complementary strand | 1574982 | 1577777 |
| JW1490(yddB) | Complementary strand | 1577822 | 1580194 |
| JW1491(yddA) | Complementary strand | 1580232 | 1580963 |
| JW1492(chuR) | Complementary strand | 1582208 | 1583365 |
| JW1493(301#2) | Complementary strand | 1583417 | 1585132 |
| JW1494(ydeO) | Complementary strand | 1585501 | 1586262 |
| JW1495(301#4) | Complementary strand | 1586782 | 1589061 |
| JW1496(fimH) | Complementary strand | 1589395 | 1590309 |
| JW1497(fimG) | Complementary strand | 1590368 | 1590871 |
| JW1498(fimF) | Complementary strand | 1590884 | 1591414 |
| JW1499(fimD) | Complementary strand | 1591428 | 1592576 |
| JW1500(hipA) | Complementary strand | 1593429 | 1594751 |
| JW1501(hipB) | Complementary strand | 1594751 | 1595017 |
| JW1502(aidA) | Complementary strand | 1595240 | 1596640 |
| JW1503(ydeK) | Complementary strand | 1596684 | 1600661 |
| JW1504(ydeV) | Complementary strand | 1601192 | 1602784 |
| JW1505(ydeW) | Complementary strand | 1602863 | 1603816 |
| JW1506(rbsA) | | 1604065 | 1605600 |
| JW1507(ydeY) | | 1605594 | 1606622 |
| JW1508(ydeZ) | | 1606622 | 1607614 |
| JW1509(304#1) | | 1607626 | 1608648 |
| JW1510(yneB) | | 1608675 | 1609550 |
| JW1511(yneC) | | 1609574 | 1609864 |
| JW1512(tam) | | 1609921 | 1610679 |
| JW1513(304#5) | Complementary strand | 1610683 | 1611648 |
| JW1514(uxaB) | Complementary strand | 1611804 | 1613255 |
| JW1515(305#1) | Complementary strand | 1613482 | 1614381 |
| JW1516(yneG) | Complementary strand | 1614541 | 1614900 |
| JW1517(yneH) | Complementary strand | 1614900 | 1615826 |
| JW1518(yneI) | Complementary strand | 1615890 | 1617302 |
| JW1519(yneJ) | | 1617379 | 1618260 |
| JW1520(305#6) | | 1618338 | 1619453 |
| JW1521(ydeA) | | 1619603 | 1620793 |
| JW1522(marC) | Complementary strand | 1620818 | 1621483 |
| JW1523(marR) | | 1621752 | 1622129 |
| JW1524(marA) | | 1622143 | 1622532 |
| JW1525(marB) | | 1622564 | 1622782 |
| JW1526(ydeD) | Complementary strand | 1622813 | 1623613 |
| JW1527(ydeF) | | 1623907 | 1625094 |
| JW1528(ydeH) | Complementary strand | 1625535 | 1626425 |
| JW1529(ydeI) | Complementary strand | 1626680 | 1627072 |
| JW1530(ydeJ) | | 1627348 | 1627866 |
| JW1531(dcp) | Complementary strand | 1627910 | 1629955 |
| JW1532(ydfG) | | 1630092 | 1630838 |
| JW1533(ydfH) | | 1630927 | 1631613 |
| JW1534(ydfZ) | | 1631790 | 1631993 |
| JW1535(ydfI) | Complementary strand | 1632028 | 1633488 |
| JW1536(shiA) | Complementary strand | 1633577 | 1634860 |
| JW1537(307#4.1) | | 1635614 | 1635880 |
| JW1538(tnpR) | | 1636197 | 1636787 |
| JW1539(ydfM) | Complementary strand | 1636885 | 1637460 |
| JW1540(Y314_LAMBD) | Complementary strand | 1637460 | 1638422 |
| JW1541(nohA) | Complementary strand | 1638373 | 1638942 |
| JW1542(ydfO) | | 1639607 | 1640032 |
| JW1543(yccL) | Complementary strand | 1640184 | 1640360 |
| JW1544(cspI) | Complementary strand | 1641030 | 1641242 |
| JW1545(308#2) | Complementary strand | 1641605 | 1642102 |
| JW1546(lycV) | Complementary strand | 1642099 | 1642632 |
| JW1547(ydfR) | Complementary strand | 1642629 | 1642940 |
| JW1548(vlyS) | Complementary strand | 1642945 | 1643235 |
| JW1549(cspB) | Complementary strand | 1643914 | 1644129 |
| JW1550(cspF) | | 1644430 | 1644642 |
| JW1551(regQ_LAMBD) | Complementary strand | 1645064 | 1645816 |
| JW1552(309#4) | Complementary strand | 1645830 | 1646879 |
| JW1553(rem) | Complementary strand | 1647226 | 1647477 |
| JW1554(hokD) | Complementary strand | 1647694 | 1647849 |
| JW1555(relE) | Complementary strand | 1647921 | 1648208 |
| JW1556(relB) | Complementary strand | 1648208 | 1648447 |
| JW1557(ydfV) | | 1648472 | 1648777 |
| JW1558(flxA) | | 1648980 | 1649312 |
| JW1559(ydfW) | Complementary strand | 1649749 | 1649898 |
| JW1560(ydfX) | Complementary strand | 1649921 | 1650211 |
| JW1561(dicC) | Complementary strand | 1650195 | 1650425 |
| JW1562(dicA) | | 1650509 | 1650916 |
| JW1563(ydfA) | | 1651083 | 1651238 |
| JW1564(ydfB) | | 1651240 | 1651368 |
| JW1565(ydfC) | | 1651398 | 1651616 |
| JW1566(dicB) | | 1652184 | 1652372 |
| JW1567(ydfD) | | 1652369 | 1652560 |
| JW1568(ydfE) | | 1652653 | 1653573 |
| JW1569(yi24) | Complementary strand | 1653417 | 1653683 |
| JW1570(yi22) | | 1653456 | 1654112 |
| JW1571(309#17.2) | | 1654087 | 1655283 |
| JW1572(rspB) | Complementary strand | 1655471 | 1656490 |
| JW1573(rspA) | Complementary strand | 1656502 | 1657716 |
| JW1574(ynfA) | Complementary strand | 1657922 | 1658248 |
| JW1575(ynfB) | | 1658383 | 1658724 |
| JW1576(speG) | | 1658759 | 1659319 |
| JW1577(ynfC) | Complementary strand | 1659322 | 1660068 |
| JW1578(ynfD) | | 1660098 | 1660445 |
| JW1579(ynfE) | | 1660644 | 1663070 |
| JW1580(ynfF) | | 1663128 | 1665554 |
| JW1581(dmsB) | | 1665565 | 1666182 |
| JW1582(dmsC) | | 1665944 | 1667038 |
| JW1583(ynfI) | | 1667072 | 1667695 |
| JW1584(yadQ) | | 1667854 | 1669146 |
| JW1585(bioD) | Complementary strand | 1669099 | 1669806 |
| JW1586(mlc) | Complementary strand | 1669919 | 1671139 |
| JW1587(ynfL) | Complementary strand | 1671274 | 1672167 |
| JW1588(ynfM) | | 1672274 | 1673527 |
| JW1589(asr) | | 1673924 | 1674259 |
| JW1590(311#13) | | 1674535 | 1675356 |
| JW1591(312#0.1) | Complementary strand | 1675395 | 1675724 |
| JW1592(ebr) | Complementary strand | 1675711 | 1676076 |
| JW1593(yhhT) | | 1676488 | 1677522 |
| JW1594(pntB) | Complementary strand | 1677547 | 1678935 |
| JW1595(pntA) | Complementary strand | 1678946 | 1680478 |
| JW1596(313#2) | | 1681002 | 1681946 |
| JW1597(arcD) | | 1682132 | 1683514 |
| JW1598(ydgB) | | 1683551 | 1684273 |
| JW1599(ydgC) | Complementary strand | 1684270 | 1684605 |
| JW1600(rstA) | | 1684725 | 1685453 |
| JW1601(rstB) | | 1685457 | 1686758 |
| JW1602(tus) | | 1686834 | 1687763 |
| JW1603(fumC) | Complementary strand | 1687760 | 1689163 |
| JW1604(fumA) | Complementary strand | 1689306 | 1690952 |
| JW1605(manA) | | 1691151 | 1692326 |
| JW1606(ydgA) | | 1692427 | 1693935 |
| JW1607(uidC) | Complementary strand | 1694161 | 1695426 |
| JW1608(uidB) | Complementary strand | 1695465 | 1696838 |
| JW1609(uidA) | Complementary strand | 1696835 | 1698646 |
| JW1610(uidR) | Complementary strand | 1699037 | 1699627 |
| JW1611(hdhA) | Complementary strand | 1699848 | 1700615 |
| JW1612(malI) | Complementary strand | 1700727 | 1701755 |
| JW1613(malX) | | 1701930 | 1703522 |
| JW1614(malY) | | 1703532 | 1704704 |
| JW1615(add) | | 1704808 | 1705809 |
| JW1616(yhhX) | Complementary strand | 1705843 | 1706922 |
| JW1616.1(blr) | | 1707126 | 1707251 |
| JW1617(ydgT) | | 1707524 | 1707739 |
| JW1618(ydgK) | | 1707825 | 1708265 |
| JW1619(ydgQ) | | 1708342 | 1708923 |
| JW1620(ydgM) | | 1708923 | 1709501 |
| JW1621(316#6) | | 1709494 | 1711716 |
| JW1622(ydgO) | | 1711717 | 1712775 |
| JW1623(ydgP) | | 1712779 | 1713399 |
| JW1624(ydgQ) | | 1713403 | 1714098 |
| JW1625(nth) | | 1714098 | 1714733 |
| JW1626(ydgR) | | 1715344 | 1716846 |
| JW1627(gst) | | 1716952 | 1717557 |
| JW1628(pdxY) | Complementary strand | 1717601 | 1718464 |
| JW1629(tyrS) | Complementary strand | 1718523 | 1719797 |
| JW1630(pdxH) | Complementary strand | 1719926 | 1720582 |
| JW1631(ydhA) | Complementary strand | 1720641 | 1720970 |
| JW1632(ydhH) | Complementary strand | 1721068 | 1722177 |
| JW1633(slyB) | | 1722451 | 1722918 |
| JW1634(slyA) | Complementary strand | 1722965 | 1723405 |
| JW1635(ydhI) | | 1723600 | 1723836 |
| JW1636(yhcQ) | | 1723839 | 1724696 |
| JW1637(yhcP) | | 1724696 | 1726708 |
| JW1638(sodC) | Complementary strand | 1726709 | 1727230 |
| JW1639(ydhF) | Complementary strand | 1727311 | 1728207 |
| JW1640(ydhL) | Complementary strand | 1728256 | 1728666 |
| JW1641(ydhM) | | 1728682 | 1729197 |
| JW1642(nemA) | | 1729234 | 1730331 |
| JW1643(gloA) | | 1730412 | 1730819 |
| JW1644(rnt) | | 1730922 | 1731569 |
| JW1645(lhr) | | 1731662 | 1736278 |
| JW1646(ydhD) | Complementary strand | 1736329 | 1736676 |
| JW1647(ydhO) | | 1737079 | 1737825 |
| JW1648(sodB) | | 1737953 | 1738534 |
| JW1649(araJ) | Complementary strand | 1738696 | 1739865 |
| JW1650(purR) | | 1740419 | 1741444 |
| JW1651(ydhB) | Complementary strand | 1741441 | 1742373 |
| JW1652(ydhC) | | 1742486 | 1743697 |
| JW1653(cfa) | | 1743988 | 1745136 |
| JW1654(ribE) | Complementary strand | 1745176 | 1745817 |
| JW1655(ydhE) | | 1746032 | 1747405 |
| JW1656(ag43) | Complementary strand | 1747446 | 1748702 |
| JW1657(319#9) | | 1749275 | 1749580 |
| JW1658(319#10) | | 1749706 | 1751310 |
| JW1659(319#11) | Complementary strand | 1751322 | 1752134 |
| JW1660(phsC) | Complementary strand | 1752138 | 1752923 |
| JW1661(nrfC) | Complementary strand | 1752920 | 1753639 |
| JW1662(319#14) | Complementary strand | 1753652 | 1754299 |
| JW1663(ydhV) | Complementary strand | 1754303 | 1756489 |
| JW1664(319#16) | Complementary strand | 1756426 | 1757052 |
| JW1665(319#17) | Complementary strand | 1757507 | 1757716 |
| JW1666(pykF) | | 1758273 | 1759685 |
| JW1667(lpp) | | 1759996 | 1760232 |
| JW1668(ynhG) | Complementary strand | 1760296 | 1761300 |
| JW1669(ynhA) | Complementary strand | 1761449 | 1761865 |
| JW1670(sufS) | Complementary strand | 1761878 | 1763098 |
| JW1671(ynhC) | Complementary strand | 1763095 | 1764366 |
| JW1672(ynhD) | Complementary strand | 1764341 | 1765087 |
| JW1673(ynhE) | Complementary strand | 1765097 | 1766623 |
| JW1674(ydiC) | Complementary strand | 1766593 | 1766961 |
| JW1675(ydiH) | Complementary strand | 1767509 | 1767778 |
| JW1676(ybdB) | Complementary strand | 1767797 | 1768207 |
| JW1677(ydiJ) | Complementary strand | 1768204 | 1771260 |
| JW1678(320#10) | | 1771649 | 1772761 |
| JW1679(ydiL) | | 1773190 | 1773546 |
| JW1680(ydiM) | | 1773646 | 1774860 |
| JW1681(ydiN) | | 1775087 | 1776352 |
| JW1682(ydiB) | | 1776364 | 1777230 |
| JW1683(aroD) | | 1777261 | 1778019 |
| JW1684(ydiF) | | 1778162 | 1779757 |
| JW1685(ydiO) | | 1779717 | 1780922 |
| JW1686(321#8) | Complementary strand | 1780965 | 1781876 |
| JW1687(ydiQ) | | 1782093 | 1782956 |
| JW1688(ydiR) | | 1782976 | 1783914 |
| JW1689(ydiS) | | 1783970 | 1785259 |
| JW1690(ydiT) | | 1785256 | 1785549 |
| JW1691(ydiD) | | 1785552 | 1787252 |
| JW1692(ppsA) | Complementary strand | 1787309 | 1789687 |
| JW1693(ydiA) | | 1790020 | 1790853 |
| JW1694(aroH) | | 1791010 | 1792056 |
| JW1695(ydiE) | | 1792188 | 1792379 |
| JW1696(ydiU) | Complementary strand | 1792383 | 1793819 |
| JW1697(323#1) | Complementary strand | 1793882 | 1794595 |
| JW1698(nlpC) | Complementary strand | 1794842 | 1795306 |
| JW1699(btuD) | Complementary strand | 1795384 | 1796133 |
| JW1700(btuE) | Complementary strand | 1796133 | 1796684 |
| JW1701(btuC) | Complementary strand | 1796747 | 1797727 |
| JW1702(himA) | Complementary strand | 1797828 | 1798127 |
| JW1703(pheT) | Complementary strand | 1798132 | 1800519 |
| JW1704(pheS) | Complementary strand | 1800534 | 1801529 |
| JW1705(pheM) | Complementary strand | 1801801 | 1801845 |
| JW1706(rplT) | Complementary strand | 1801968 | 1802324 |
| JW1707(rpmI) | Complementary strand | 1802377 | 1802574 |
| JW1708(infC) | Complementary strand | 1802671 | 1803105 |
| JW1709(thrS) | Complementary strand | 1803217 | 1805145 |
| JW1710(arp) | | 1806153 | 1807568 |
| JW1711(324#3) | Complementary strand | 1807900 | 1808658 |
| JW1712(pfkB) | | 1808942 | 1809874 |
| JW1713(ydiZ) | | 1809975 | 1810265 |
| JW1714(325#1) | | 1810371 | 1811231 |
| JW1715(yniB) | Complementary strand | 1811272 | 1811808 |
| JW1716(yniC) | | 1811955 | 1812623 |
| JW1717(325#4) | | 1812786 | 1813376 |
| JW1718(325#5) | | 1813509 | 1814900 |
| JW1719(ydjO) | Complementary strand | 1814904 | 1815719 |
| JW1720(cedA) | Complementary strand | 1815996 | 1816259 |
| JW1721(katE) | | 1816442 | 1818703 |
| JW1722(ydjC) | Complementary strand | 1818961 | 1819710 |
| JW1723(celF) | Complementary strand | 1819723 | 1821075 |
| JW1724(celD) | Complementary strand | 1821180 | 1822022 |
| JW1725(celC) | Complementary strand | 1822030 | 1822380 |
| JW1726(celB) | Complementary strand | 1822431 | 1823789 |
| JW1727(celA) | Complementary strand | 1823874 | 1824194 |
| JW1728(osmE) | Complementary strand | 1824493 | 1824831 |
| JW1729(nadE) | | 1825033 | 1825860 |
| JW1730(327#4) | | 1826090 | 1826977 |
| JW1731(327#5) | Complementary strand | 1826937 | 1827512 |
| JW1732(spy) | Complementary strand | 1827715 | 1828200 |
| JW1733(astE) | Complementary strand | 1828530 | 1829498 |
| JW1734(astB) | Complementary strand | 1829491 | 1830834 |
| JW1735(astD) | Complementary strand | 1830831 | 1832366 |
| JW1736(astA) | Complementary strand | 1832306 | 1833340 |
| JW1737(cstC) | Complementary strand | 1833337 | 1834557 |
| JW1738(xthA) | | 1835003 | 1835809 |
| JW1739(yqeD) | | 1835976 | 1836686 |
| JW1740(ydjY) | | 1836529 | 1837368 |
| JW1741(ydjZ) | | 1837383 | 1838090 |
| JW1742(ynjA) | | 1838090 | 1838638 |
| JW1743(328#9) | | 1838645 | 1839814 |
| JW1744(ynjC) | | 1840282 | 1841322 |
| JW1745(328#11) | | 1841235 | 1841975 |
| JW1746(ynjE) | | 1842027 | 1843349 |
| JW1747(328#13) | Complementary strand | 1843358 | 1843978 |
| JW1748(328#14) | | 1844065 | 1844472 |
| JW1749(328#15) | Complementary strand | 1844438 | 1844710 |
| JW1750(gdhA) | | 1844946 | 1846289 |
| JW1751(329#1) | Complementary strand | 1846406 | 1847569 |
| JW1752(topB) | Complementary strand | 1847574 | 1849535 |
| JW1753(selD) | Complementary strand | 1849540 | 1850583 |
| JW1754(ydjA) | Complementary strand | 1850700 | 1851251 |
| JW1755(sppA) | | 1851412 | 1853268 |
| JW1756(ansA) | | 1853435 | 1854451 |
| JW1757(ydjB) | | 1854462 | 1855103 |
| JW1758(ydjE) | Complementary strand | 1855196 | 1856554 |
| JW1759(ydjF) | Complementary strand | 1856671 | 1857429 |
| JW1760(ydjG) | Complementary strand | 1857566 | 1858546 |
| JW1761(330#4) | Complementary strand | 1858556 | 1859524 |
| JW1762(330#5) | Complementary strand | 1859508 | 1860344 |
| JW1763(ydjJ) | Complementary strand | 1860365 | 1861408 |
| JW1764(ydjK) | Complementary strand | 1861425 | 1862732 |
| JW1765(tdh) | Complementary strand | 1862831 | 1863907 |
| JW1766(330#9) | Complementary strand | 1864277 | 1864549 |
| JW1767(yeaA) | Complementary strand | 1864591 | 1865004 |
| JW1768(gapA) | | 1865346 | 1866341 |
| JW1769(yzzQ) | | 1866425 | 1867309 |
| JW1770(331#2) | Complementary strand | 1867357 | 1868211 |
| JW1771(yeaF) | Complementary strand | 1868301 | 1869047 |
| JW1772(yeaG) | | 1869483 | 1871417 |
| JW1773(yeaH) | | 1871530 | 1872813 |
| JW1774(yeaI) | | 1872960 | 1874435 |
| JW1775(yeaJ) | | 1874436 | 1876106 |
| JW1776(yeaK) | | 1876149 | 1876652 |
| JW1777(332#0.1) | Complementary strand | 1876653 | 1876787 |
| JW1778(yeaL) | | 1876927 | 1877373 |
| JW1179(yeaM) | Complementary strand | 1877330 | 1878151 |
| JW1780(yeaN) | | 1878248 | 1879429 |
| JW1781(yeaO) | | 1879484 | 1879831 |
| JW1782(yoaF) | Complementary strand | 1879853 | 1880107 |
| JW1783(332#6) | | 1880161 | 1881315 |
| JW1784(333#1) | Complementary strand | 1881582 | 1881830 |
| JW1785(yoaG) | Complementary strand | 1881978 | 1882160 |
| JW1786(yeaR) | Complementary strand | 1882164 | 1882523 |
| JW1787(yeaS) | Complementary strand | 1882696 | 1883334 |
| JW1788(yeaT) | Complementary strand | 1883461 | 1884384 |
| JW1789(ttuC) | | 1884487 | 1885572 |
| JW1790(caiT) | | 1885769 | 1887208 |
| JW1791(yeaW) | | 1887120 | 1888364 |
| JW1792(yeaX) | | 1888420 | 1889385 |
| JW1793(rnd) | Complementary strand | 1889439 | 1890566 |
| JW1794(fadD) | Complementary strand | 1890636 | 1892321 |
| JW1795(slp) | Complementary strand | 1892526 | 1893107 |
| JW1796(yeaZ) | Complementary strand | 1893147 | 1893842 |
| JW1797(yoaA) | Complementary strand | 1893900 | 1895810 |
| JW1798(yoaB) | | 1895939 | 1896286 |
| JW1799(334#5.1) | | 1896684 | 1897007 |
| JW1800(yoaH) | Complementary strand | 1897127 | 1897306 |
| JW1801(pabB) | | 1897380 | 1898741 |
| JW1802(yeaB) | | 1898745 | 1899323 |
| JW1803(sdaA) | | 1899507 | 1900871 |
| JW1804(rtn) | | 1901002 | 1902600 |
| JW1805(yoaE) | Complementary strand | 1902604 | 1904160 |
| JW1806(manX) | | 1904623 | 1905594 |
| JW1807(manY) | | 1905657 | 1906457 |
| JW1808(manZ) | | 1906461 | 1907321 |
| JW1809(335#5) | | 1907376 | 1907834 |
| JW1810(yebN) | | 1908209 | 1908829 |
| JW1811(rrmA) | Complementary strand | 1908826 | 1909635 |
| JW1812(cspC) | Complementary strand | 1909801 | 1910010 |
| JW1813(335#9.1) | Complementary strand | 1910023 | 1910166 |
| JW1814(335#10) | Complementary strand | 1910836 | 1911123 |
| JW1815(335#10.1) | Complementary strand | 1911198 | 1911341 |
| JW1816(kdgR) | Complementary strand | 1911883 | 1912674 |
| JW1817(tcmA) | | 1912740 | 1914224 |
| JW1818(htpX) | Complementary strand | 1914270 | 1915151 |
| JW1819(prc) | Complementary strand | 1915343 | 1917391 |
| JW1820(yebJ) | Complementary strand | 1917411 | 1917530 |
| JW1821(336#2) | Complementary strand | 1918206 | 1918757 |
| JW1822(yebS) | | 1918833 | 1920116 |
| JW1823(pqiB) | | 1920085 | 1922718 |
| JW1824(yebU) | | 1922792 | 1924237 |
| JW1825(336#6) | | 1924340 | 1924591 |
| JW1826(336#7) | | 1924612 | 1924887 |
| JW1827(pphA) | Complementary strand | 1924888 | 1925544 |
| JW1828(336#9) | Complementary strand | 1925940 | 1926281 |
| JW1829(336#10) | Complementary strand | 1926294 | 1927166 |
| JW1830(336#11) | Complementary strand | 1927170 | 1927544 |
| JW1831(holE) | | 1927683 | 1927913 |
| JW1832(336#13) | | 1928015 | 1928671 |
| JW1833(exoX) | | 1928695 | 1929357 |
| JW1834(ptrB) | Complementary strand | 1929354 | 1931414 |
| JW1835(yebE) | Complementary strand | 1931623 | 1932282 |
| JW1836(yebF) | Complementary strand | 1932609 | 1932977 |
| JW1837(yebG) | Complementary strand | 1933032 | 1933322 |
| JW1838(purT) | | 1933456 | 1934634 |
| JW1839(eda) | Complementary strand | 1934690 | 1935331 |
| JW1840(edd) | Complementary strand | 1935368 | 1937179 |
| JW1841(zwf) | Complementary strand | 1937414 | 1938889 |
| JW1842(yebK) | | 1939227 | 1940096 |
| JW1843(pykA) | | 1940224 | 1941666 |
| JW1844(mlt) | Complementary strand | 1941797 | 1942768 |
| JW1845(yebA) | Complementary strand | 1942888 | 1944147 |
| JW1846(znuA) | Complementary strand | 1944226 | 1945212 |
| JW1847(znuC) | | 1945237 | 1945992 |
| JW1848(yebI) | | 1945989 | 1946774 |
| JW1849(ruvB) | Complementary strand | 1946921 | 1947931 |
| JW1850(ruvA) | Complementary strand | 1947940 | 1948551 |
| JW1851(yebB) | | 1948727 | 1949428 |
| JW1852(ruvC) | Complementary strand | 1949430 | 1949951 |
| JW1853(yebC) | Complementary strand | 1949986 | 1950726 |
| JW1854(ntpA) | Complementary strand | 1950755 | 1951207 |
| JW1855(aspS) | Complementary strand | 1951325 | 1953097 |
| JW1856(yecD) | | 1953374 | 1953973 |
| JW1857(yecE) | | 1953970 | 1954788 |
| JW1858(yecN) | | 1954682 | 1955236 |
| JW1859(yecO) | | 1955277 | 1956020 |
| JW1860(yecP) | | 1956017 | 1956988 |
| JW1861(bisZ) | Complementary strand | 1957153 | 1959582 |
| JW1862(torY) | Complementary strand | 1959607 | 1960707 |
| JW1863(cutC) | Complementary strand | 1961095 | 1961841 |
| JW1864(yecL) | Complementary strand | 1961855 | 1961989 |
| JW1865(argS) | | 1962637 | 1964370 |
| JW1866(yecT) | | 1964526 | 1965035 |
| JW1867(flhE) | Complementary strand | 1965155 | 1965547 |
| JW1868(flhA) | Complementary strand | 1965547 | 1967625 |
| JW1869(flhB) | Complementary strand | 1967618 | 1968766 |
| JW1870(cheZ) | Complementary strand | 1968968 | 1969612 |
| JW1871(cheY) | Complementary strand | 1969623 | 1970012 |
| JW1872(cheB) | Complementary strand | 1970027 | 1971076 |
| JW1873(cheR) | Complementary strand | 1971079 | 1971939 |
| JW1874(tap) | Complementary strand | 1971958 | 1973559 |
| JW1875(tar) | Complementary strand | 1973605 | 1975266 |
| JW1876(cheW) | Complementary strand | 1975411 | 1975914 |
| JW1877(cheA) | Complementary strand | 1975935 | 1977899 |
| JW1878(motB) | Complementary strand | 1977904 | 1978830 |
| JW1879(motA) | Complementary strand | 1978827 | 1979714 |
| JW1880(flhC) | Complementary strand | 1979841 | 1980419 |
| JW1881(flhD) | Complementary strand | 1980422 | 1980781 |
| JW1882(340#3.1) | Complementary strand | 1981216 | 1982232 |
| JW1883(340#3.2) | | 1981552 | 1981920 |
| JW1884(yecG) | | 1982751 | 1983179 |
| JW1885(otsA) | Complementary strand | 1983186 | 1984616 |
| JW1886(otsB) | Complementary strand | 1984585 | 1985385 |
| JW1887(araH) | Complementary strand | 1985552 | 1986541 |
| JW1888(araG) | Complementary strand | 1986553 | 1988067 |
| JW1889(araF) | Complementary strand | 1988137 | 1989126 |
| JW1890(yecI) | | 1989923 | 1990426 |
| JW1891(yecJ) | Complementary strand | 1990505 | 1990756 |
| JW1892(341#5) | | 1991220 | 1991543 |
| JW1893(ftn) | | 1991714 | 1992211 |
| JW1894(yecH) | Complementary strand | 1992249 | 1992488 |
| JW1895(tyrP) | | 1992679 | 1993890 |
| JW1896(yecA) | Complementary strand | 1993952 | 1994617 |
| JW1897(pgsA) | Complementary strand | 1995267 | 1995815 |
| JW1898(uvrC) | Complementary strand | 1995872 | 1997704 |
| JW1899(uvrY) | Complementary strand | 1997701 | 1998357 |
| JW1900(yecF) | | 1998816 | 1999040 |
| JW1901(sdiA) | Complementary strand | 1999108 | 1999830 |
| JW1902(yecC) | Complementary strand | 2000060 | 2000812 |
| JW1903(yecS) | Complementary strand | 2000809 | 2001477 |
| JW1904(yedO) | Complementary strand | 2001492 | 2002574 |
| JW1905(fliY) | Complementary strand | 2002583 | 2003383 |
| JW1906(fliZ) | Complementary strand | 2003471 | 2004022 |
| JW1907(fliA) | Complementary strand | 2004068 | 2004787 |
| JW1908(fliC) | Complementary strand | 2005108 | 2006604 |
| JW1909(fliD) | | 2006870 | 2008276 |
| JW1910(fliS) | | 2008301 | 2008711 |
| JW1911(fliT) | | 2008711 | 2009076 |
| JW1912(amyA) | | 2009154 | 2010641 |
| JW1913(yedD) | Complementary strand | 2010675 | 2011088 |
| JW1914(yedE) | | 2011275 | 2012480 |
| JW1915(yedF) | | 2012477 | 2012710 |
| JW1916(yedK) | | 2012819 | 2013487 |
| JW1917(yedL) | | 2013598 | 2014077 |
| JW1918(yedN) | Complementary strand | 2014346 | 2014537 |
| JW1919(yedN) | Complementary strand | 2014547 | 2014867 |
| JW1920(yedM) | Complementary strand | 2014999 | 2015349 |
| JW1921(fliE) | Complementary strand | 2015698 | 2016012 |
| JW1922(fliF) | | 2016227 | 2017885 |
| JW1923(fliG) | | 2017878 | 2018873 |
| JW1924(fliH) | | 2018866 | 2019552 |
| JW1925(fliI) | | 2019552 | 2020925 |
| JW1926(fliJ) | | 2020944 | 2021387 |
| JW1927(fliK) | | 2021384 | 2022511 |
| JW1928(fliL) | | 2022616 | 2023080 |
| JW1929(fliM) | | 2023085 | 2024089 |
| JW1930(fliN) | | 2024086 | 2024499 |
| JW1931(fliO) | | 2024562 | 2024867 |
| JW1932(fliP) | | 2024867 | 2025604 |
| JW1933(fliQ) | | 2025614 | 2025883 |
| JW1934(fliR) | | 2025891 | 2026676 |
| JW1935(rcsA) | | 2026966 | 2027589 |
| JW1936(dsrB) | Complementary strand | 2027633 | 2027821 |
| JW1937(344#6) | | 2027981 | 2028211 |
| JW1938(yedP) | | 2028509 | 2029324 |
| JW1939(344#8) | Complementary strand | 2029321 | 2031015 |
| JW1940(344#9) | Complementary strand | 2031186 | 2031368 |
| JW1941(yedI) | Complementary strand | 2031447 | 2032364 |
| JW1942(yedA) | | 2032537 | 2033457 |
| JW1943(vsr) | Complementary strand | 2033446 | 2033916 |
| JW1944(dcm) | Complementary strand | 2033897 | 2035315 |
| JW1945(yedJ) | Complementary strand | 2035382 | 2036077 |
| JW1946(344#15) | Complementary strand | 2036117 | 2036482 |
| JW1947(ompC) | | 2037019 | 2037534 |
| JW1948(344#17) | | 2037544 | 2037753 |
| JW1949(yedS) | | 2037837 | 2038241 |
| JW1950(yedU) | | 2038833 | 2039684 |
| JW1951(yedV) | Complementary strand | 2039792 | 2041150 |
| JW1952(copR) | Complementary strand | 2041150 | 2041932 |
| JW1953(yedX) | | 2041954 | 2042367 |
| JW1954(345#1) | | 2042476 | 2043480 |
| JW1955(345#2) | | 2043481 | 2044116 |
| JW1956(345#3) | | 2044373 | 2045023 |
| JW1957(yodB) | | 2045342 | 2045896 |
| JW1958(345#5) | | 2046649 | 2047446 |
| JW1959(eaeH) | | 2047909 | 2055012 |
| JW1960(347#0.1) | Complementary strand | 2055274 | 2055441 |
| JW1961(347#1) | Complementary strand | 2055622 | 2056326 |
| JW1962(shiA) | | 2056641 | 2057957 |
| JW1963(amn) | | 2058059 | 2059513 |
| JW1964(347#4) | | 2059856 | 2060572 |
| JW1965(yeeO) | Complementary strand | 2061201 | 2062844 |
| JW1966(cbl) | Complementary strand | 2062962 | 2063912 |
| JW1967(nac) | Complementary strand | 2064014 | 2064931 |
| JW1968(erfK) | Complementary strand | 2065389 | 2066321 |
| JW1969(cobT) | Complementary strand | 2066386 | 2067465 |
| JW1970(cobS) | Complementary strand | 2067477 | 2068220 |
| JW1971(cobU) | Complementary strand | 2068217 | 2068762 |
| JW1972(is5B) | Complementary strand | 2069303 | 2070319 |
| JW1973(yi51) | | 2069711 | 2070007 |
| JW1974(348#3) | | 2071621 | 2072025 |
| JW1975(yi22) | Complementary strand | 2071950 | 2072855 |
| JW1976(yi24) | | 2072379 | 2072810 |
| JW1977(yi23) | Complementary strand | 2072489 | 2072782 |
| JW1978(yi2A) | Complementary strand | 2072813 | 2073223 |
| JW1979(348#3.5) | | 2073135 | 2073296 |
| JW1980(348#4) | | 2073242 | 2073502 |
| JW1981(yeeP) | | 2073499 | 2074209 |
| JW1982(flu) | | 2074537 | 2077656 |
| JW1983(349#2) | | 2077777 | 2079309 |
| JW1984(yeeS) | | 2079306 | 2079752 |
| JW1985(yeeT) | | 2079815 | 2080036 |
| JW1986(yeeU) | | 2080110 | 2080478 |
| JW1987(yeeV) | | 2080567 | 2080941 |
| JW1988(yeeW) | | 2080938 | 2081132 |
| JW1989(yeeX) | Complementary strand | 2082030 | 2082425 |
| JW1990(yeeA) | Complementary strand | 2082531 | 2083589 |
| JW1991(gyrI) | Complementary strand | 2083787 | 2084260 |
| JW1992(phsE) | Complementary strand | 2084379 | 2085551 |
| JW1993(sbcB) | | 2085754 | 2087181 |
| JW1994(yeeD) | Complementary strand | 2087224 | 2087451 |
| JW1995(yeeE) | Complementary strand | 2087465 | 2088523 |
| JW1996(yeeF) | Complementary strand | 2088702 | 2090066 |
| JW1997(yeeY) | Complementary strand | 2090327 | 2091277 |
| JW1998(yeeZ) | Complementary strand | 2091302 | 2092126 |
| JW1999(yefM) | Complementary strand | 2092460 | 2092711 |
| JW2000(hisL) | | 2092994 | 2093044 |
| JW2001(hisG) | | 2093190 | 2094089 |
| JW2002(hisD) | | 2094095 | 2095399 |
| JW2003(hisC) | | 2095396 | 2096466 |
| JW2004(hisB) | | 2096466 | 2097533 |
| JW2005(hisH) | | 2097533 | 2098123 |
| JW2006(hisA) | | 2098123 | 2098860 |
| JW2007(hisF) | | 2098842 | 2099618 |
| JW2008(hisI) | | 2099612 | 2100223 |
| JW2009(wzz) | Complementary strand | 2100319 | 2101299 |
| JW2010(ugd) | Complementary strand | 2101445 | 2102611 |
| JW2011(gnd) | Complementary strand | 2102860 | 2104266 |
| JW2012(yefJ) | Complementary strand | 2104394 | 2104675 |
| JW2013(351#10) | | 2104805 | 2104855 |
| JW2014(is5B) | Complementary strand | 2104893 | 2105909 |
| JW2015(yi51) | | 2105229 | 2105597 |
| JW2016(yefJ) | Complementary strand | 2105914 | 2106387 |
| JW2017(yefI) | Complementary strand | 2106389 | 2107507 |
| JW2018(wbbJ) | Complementary strand | 2107492 | 2108082 |
| JW2019(yefG) | Complementary strand | 2108063 | 2109055 |
| JW2020(rfc) | Complementary strand | 2109058 | 2110224 |
| JW2021(glf) | Complementary strand | 2110224 | 2111327 |
| JW2022(rfbX) | Complementary strand | 2111335 | 2112582 |
| JW2023(rfbC) | Complementary strand | 2112579 | 2113136 |
| JW2024(rfbA) | Complementary strand | 2113136 | 2114017 |
| JW2025(rfbD) | Complementary strand | 2114075 | 2114974 |
| JW2026(rfbB) | Complementary strand | 2114974 | 2116059 |
| JW2027(galF) | Complementary strand | 2116432 | 2117325 |
| JW2028(wcaM) | Complementary strand | 2117500 | 2118894 |
| JW2029(wcaL) | Complementary strand | 2118905 | 2120125 |
| JW2030(wcaK) | Complementary strand | 2120122 | 2121402 |
| JW2031(wzxC) | Complementary strand | 2121678 | 2123156 |
| JW2032(wcaJ) | Complementary strand | 2123158 | 2124552 |
| JW2033(cpsG) | Complementary strand | 2124607 | 2125977 |
| JW2034(cpsB) | Complementary strand | 2126082 | 2127518 |
| JW2035(wcaI) | Complementary strand | 2127521 | 2128744 |
| JW2036(wcaH) | Complementary strand | 2128741 | 2129223 |
| JW2037(wcaG) | Complementary strand | 2129223 | 2130188 |
| JW2038(gmd) | Complementary strand | 2130191 | 2131312 |
| JW2039(wcaF) | Complementary strand | 2131338 | 2131886 |
| JW2040(wcaE) | Complementary strand | 2131902 | 2132648 |
| JW2041(wcaD) | Complementary strand | 2132659 | 2133876 |
| JW2042(wcaC) | Complementary strand | 2133851 | 2135068 |
| JW2043(wcaB) | Complementary strand | 2135065 | 2135553 |
| JW2044(wcaA) | Complementary strand | 2135556 | 2136395 |
| JW2045(yccC) | Complementary strand | 2136488 | 2138650 |
| JW2046(wzb) | Complementary strand | 2138653 | 2139096 |
| JW2047(wza) | Complementary strand | 2139102 | 2140241 |
| JW2048(yegH) | | 2140861 | 2142483 |
| JW2049(asmA) | Complementary strand | 2142757 | 2144610 |
| JW2050(dcd) | Complementary strand | 2144632 | 2145213 |
| JW2051(udk) | Complementary strand | 2145305 | 2145946 |
| JW2052(yegE) | | 2146264 | 2149581 |
| JW2053(alkA) | Complementary strand | 2149690 | 2150538 |
| JW2054(yegD) | | 2150672 | 2152024 |
| JW2055(356#6) | Complementary strand | 2152037 | 2153983 |
| JW2056(356#7) | | 2154183 | 2154644 |
| JW2057(356#8) | Complementary strand | 2154709 | 2155470 |
| JW2058(356#9) | Complementary strand | 2155467 | 2156126 |
| JW2059(yegM) | | 2156894 | 2158261 |
| JW2060(yegN) | | 2158261 | 2161383 |
| JW2061(yegO) | | 2161384 | 2164461 |
| JW2062(yegB) | | 2164462 | 2165877 |
| JW2063(baeS) | | 2165874 | 2167277 |
| JW2064(baeR) | | 2167274 | 2167996 |
| JW2065(358#3) | | 2168148 | 2168519 |
| JW2066(yegQ) | | 2168666 | 2170027 |
| JW2067(ogrK) | Complementary strand | 2170300 | 2170518 |
| JW2068(358#6) | Complementary strand | 2170600 | 2170746 |
| JW2069(358#6.1) | Complementary strand | 2170987 | 2171364 |
| JW2070(yegS) | | 2171710 | 2172609 |
| JW2071(gatR) | Complementary strand | 2172691 | 2173164 |
| JW2072(358#8.1) | | 2173234 | 2173533 |
| JW2073(358#8.2) | | 2173530 | 2174396 |
| JW2074(gatR) | Complementary strand | 2174393 | 2174731 |
| JW2075(gatD) | Complementary strand | 2174831 | 2175871 |
| JW2076(gatC) | Complementary strand | 2175919 | 2177274 |
| JW2077(gatB) | Complementary strand | 2177278 | 2177562 |
| JW2078(gatA) | Complementary strand | 2177593 | 2177913 |
| JW2079(is5B) | | 2177876 | 2178892 |
| JW2080(yi51) | Complementary strand | 2178188 | 2178556 |
| JW2081(gatA) | Complementary strand | 2178930 | 2179244 |
| JW2082(gatZ) | Complementary strand | 2179254 | 2180516 |
| JW2083(gatY) | Complementary strand | 2180545 | 2181405 |
| JW2084(fbaB) | Complementary strand | 2181707 | 2182831 |
| JW2085(xegT) | | 2183016 | 2184293 |
| JW2086(yegU) | | 2184290 | 2185294 |
| JW2087(yegV) | | 2185291 | 2186256 |
| JW2088(yegW) | Complementary strand | 2186230 | 2186976 |
| JW2089(yegX) | Complementary strand | 2187028 | 2187855 |
| JW2090(thiD) | Complementary strand | 2187911 | 2188711 |
| JW2091(thiM) | Complementary strand | 2188708 | 2189496 |
| JW2092(yohL) | Complementary strand | 2189719 | 2189991 |
| JW2093(yohM) | | 2190112 | 2190936 |
| JW2094(360#4) | | 2190975 | 2191493 |
| JW2095(yehA) | Complementary strand | 2191575 | 2192609 |
| JW2096(yehB) | Complementary strand | 2192625 | 2195105 |
| JW2097(yehC) | Complementary strand | 2195121 | 2195840 |
| JW2098(yehD) | Complementary strand | 2195875 | 2196417 |
| JW2099(yehE) | Complementary strand | 2196710 | 2196991 |
| JW2100(mrp) | Complementary strand | 2197254 | 2198363 |
| JW2101(metG) | | 2198495 | 2200528 |
| JW2102(molR) | | 2200669 | 2201493 |
| JW2103(molR) | | 2201950 | 2203542 |
| JW2104(molR) | | 2204165 | 2204464 |
| JW2105(yehI) | | 2204474 | 2208106 |
| JW2106(yehK) | | 2208167 | 2208484 |
| JW2107(yehL) | | 2208725 | 2209879 |
| JW2108(yehO) | | 2209890 | 2212169 |
| JW2109(yehP) | | 2211934 | 2213298 |
| JW2110(yehQ) | | 2213295 | 2215139 |
| JW2111(yehR) | | 2215408 | 2215881 |
| JW2112(yehS) | Complementary strand | 2215921 | 2216391 |
| JW2113(yehT) | Complementary strand | 2216438 | 2217172 |
| JW2114(yehU) | Complementary strand | 2217154 | 2218854 |
| JW2115(yehV) | | 2219061 | 2219792 |
| JW2116(yehW) | Complementary strand | 2219940 | 2220671 |
| JW2117(yehX) | Complementary strand | 2220676 | 2221602 |
| JW2118(yehY) | Complementary strand | 2221595 | 2222752 |
| JW2119(yehZ) | Complementary strand | 2222759 | 2223676 |
| JW2120(bglX) | Complementary strand | 2223887 | 2226184 |
| JW2121(dld) | | 2226380 | 2228095 |
| JW2122(pbpG) | Complementary strand | 2228133 | 2229074 |
| JW2123(yohC) | Complementary strand | 2229239 | 2229850 |
| JW2124(yohD) | | 2229996 | 2230574 |
| JW2125(yohF) | Complementary strand | 2230704 | 2231465 |
| JW2126(yohG) | Complementary strand | 2231518 | 2232714 |
| JW2127(yohH) | Complementary strand | 2232744 | 2233034 |
| JW2128(yohI) | Complementary strand | 2233633 | 2234580 |
| JW2129(yohJ) | | 2234819 | 2235217 |
| JW2130(yohK) | | 2235214 | 2235909 |
| JW2131(cdd) | | 2236039 | 2236923 |
| JW2132(sanA) | | 2237073 | 2237792 |
| JW2133(gltD) | | 2238228 | 2239466 |
| JW2134(yeiA) | | 2239460 | 2240695 |
| JW2135(mglC) | Complementary strand | 2240938 | 2241948 |
| JW2136(mglA) | Complementary strand | 2241964 | 2243484 |
| JW2137(mglB) | Complementary strand | 2243545 | 2244543 |
| JW2138(galS) | Complementary strand | 2244823 | 2245863 |
| JW2139(yeiB) | Complementary strand | 2246005 | 2247162 |
| JW2140(folE) | Complementary strand | 2247179 | 2247847 |
| JW2141(yeiG) | | 2248105 | 2248941 |
| JW2142(cirA) | Complementary strand | 2248973 | 2250964 |
| JW2143(lysP) | Complementary strand | 2251258 | 2252727 |
| JW2144(yeiE) | Complementary strand | 2252932 | 2253813 |
| JW2145(yeiH) | | 2253912 | 2254961 |
| JW2146(nfo) | | 2255035 | 2255892 |
| JW2147(yeiI) | | 2255895 | 2256983 |
| JW2148(yeiJ) | Complementary strand | 2257090 | 2258340 |
| JW2149(yeiK) | Complementary strand | 2258440 | 2259381 |
| JW2150(yeiL) | | 2259550 | 2260209 |
| JW2151(yeiM) | Complementary strand | 2260280 | 2261530 |
| JW2152(yeiN) | Complementary strand | 2261624 | 2262562 |
| JW2153(yeiC) | Complementary strand | 2262550 | 2263491 |
| JW2154(fruA) | Complementary strand | 2263914 | 2265605 |
| JW2155(fruK) | Complementary strand | 2265622 | 2266560 |
| JW2156(fruB) | Complementary strand | 2266560 | 2267690 |
| JW2157(yeiO) | | 2268058 | 2269239 |
| JW2158(369#3.1) | Complementary strand | 2269236 | 2269622 |
| JW2159(yeiP) | | 2269684 | 2270217 |
| JW2160(yeiQ) | | 2270440 | 2271906 |
| JW2161(yeiR) | | 2272024 | 2273010 |
| JW2162(yeiU) | | 2273049 | 2273762 |
| JW2163(spr) | | 2274174 | 2274740 |
| JW2164(rtn) | | 2274921 | 2276477 |
| JW2165(yejA) | | 2276559 | 2278373 |
| JW2166(yejB) | | 2278374 | 2279468 |
| JW2167(yejE) | | 2279468 | 2280493 |
| JW2168(yejF) | | 2280495 | 2282084 |
| JW2169(yejG) | Complementary strand | 2282088 | 2282432 |
| JW2170(bcr) | Complementary strand | 2282765 | 2283898 |
| JW2171(rsuA) | Complementary strand | 2283983 | 2284678 |
| JW2172(yejH) | | 2284827 | 2286587 |
| JW2173(rplY) | | 2286712 | 2286996 |
| JW2174(yejK) | Complementary strand | 2287135 | 2288142 |
| JW2175(yejL) | | 2288324 | 2288551 |
| JW2176(yejM) | | 2288571 | 2290331 |
| JW2177(yejO) | Complementary strand | 2290585 | 2292807 |
| JW2178(371#9) | | 2293100 | 2293222 |
| JW2179(is5B) | Complementary strand | 2293260 | 2294276 |
| JW2180(yi51) | | 2293596 | 2293964 |
| JW2181(narP) | | 2294695 | 2295342 |
| JW2182(ccmH) | Complementary strand | 2295553 | 2296605 |
| JW2183(dsbE) | Complementary strand | 2296602 | 2297159 |
| JW2184(ccmF) | Complementary strand | 2297156 | 2299099 |
| JW2185(ccmE) | Complementary strand | 2299096 | 2299575 |
| JW2186(ccmD) | Complementary strand | 2299572 | 2299781 |
| JW2187(ccmC) | Complementary strand | 2299778 | 2300515 |
| JW2188(ccmB) | Complementary strand | 2300557 | 2301219 |
| JW2189(ccmA) | Complementary strand | 2301216 | 2301833 |
| JW2190(napC) | Complementary strand | 2301852 | 2302454 |
| JW2191(napB) | Complementary strand | 2302464 | 2302934 |
| JW2192(napH) | Complementary strand | 2302910 | 2303773 |
| JW2193(napG) | Complementary strand | 2303760 | 2304455 |
| JW2194(napA) | Complementary strand | 2304462 | 2306948 |
| JW2195(napD) | Complementary strand | 2306945 | 2307208 |
| JW2196(napF) | Complementary strand | 2307198 | 2307692 |
| JW2197(eco) | | 2308100 | 2308588 |
| JW2198(yojH) | Complementary strand | 2309303 | 2310949 |
| JW2199(yojI) | Complementary strand | 2311167 | 2312810 |
| JW2200(alkB) | Complementary strand | 2312886 | 2313536 |
| JW2201(ada) | Complementary strand | 2313536 | 2314600 |
| JW2202(apbE) | Complementary strand | 2314674 | 2315276 |
| JW2203(ompC) | Complementary strand | 2315841 | 2316944 |
| JW2204(yojN) | | 2317683 | 2320355 |
| JW2205(rcsB) | | 2320372 | 2321022 |
| JW2206(rcsC) | Complementary strand | 2321222 | 2321599 |
| JW2207(374#2.1) | | 2321622 | 2321741 |
| JW2208(yi22) | Complementary strand | 2321666 | 2322571 |
| JW2209(yi24) | | 2322095 | 2322526 |
| JW2210(yi23) | Complementary strand | 2322205 | 2322498 |
| JW2211(yi2A) | Complementary strand | 2322529 | 2322939 |
| JW2212(rcsC) | Complementary strand | 2322936 | 2325359 |
| JW2213(atoS) | | 2325574 | 2327400 |
| JW2214(atoC) | | 2327397 | 2328782 |
| JW2215(atoD) | | 2328978 | 2329640 |
| JW2216(atoA) | | 2329640 | 2330290 |
| JW2217(atoE) | | 2330287 | 2331609 |
| JW2218(atoB) | | 2331640 | 2332824 |
| JW2219(376#1) | Complementary strand | 2332898 | 2333674 |
| JW2220(376#2) | Complementary strand | 2333679 | 2335328 |
| JW2221(376#3) | Complementary strand | 2335329 | 2335814 |
| JW2222(376#4) | Complementary strand | 2335830 | 2339933 |
| JW2223(376#5) | Complementary strand | 2339867 | 2340490 |
| JW2224(yfaA) | Complementary strand | 2340487 | 2342175 |
| JW2225(gyrA) | Complementary strand | 2342324 | 2344951 |
| JW2226(ubiG) | | 2345098 | 2345820 |
| JW2227(yfaL) | Complementary strand | 2345948 | 2349700 |
| JW2228(nrdA) | | 2350396 | 2352681 |
| JW2229(nrdB) | | 2352915 | 2354045 |
| JW2230(yfaE) | | 2354045 | 2354299 |
| JW2231(inaA) | Complementary strand | 2354353 | 2355003 |
| JW2232(yfaH) | | 2355218 | 2355424 |
| JW2233(glpQ) | Complementary strand | 2355466 | 2356542 |
| JW2234(glpT) | Complementary strand | 2356547 | 2357905 |
| JW2235(glpA) | | 2358178 | 2359806 |
| JW2236(glpB) | | 2359796 | 2361055 |
| JW2237(glpC) | | 2361052 | 2362242 |
| JW2238(yfaD) | | 2362435 | 2363334 |
| JW2238.5(379#2) | | 2363347 | 2363532 |
| JW2239(yhaF) | Complementary strand | 2363573 | 2364376 |
| JW2240(379#4) | Complementary strand | 2364394 | 2365683 |
| JW2241(379#5) | Complementary strand | 2365740 | 2366957 |
| JW2242(yjhI) | Complementary strand | 2366960 | 2367742 |
| JW2243(cinA) | Complementary strand | 2367962 | 2369164 |
| JW2244(379#8) | Complementary strand | 2369264 | 2369773 |
| JW2245(yfaO) | | 2370085 | 2370510 |
| JW2246(ais) | Complementary strand | 2370549 | 2371151 |
| JW2247(ybfE) | | 2371426 | 2372598 |
| JW2248(yfbF) | | 2372602 | 2373570 |
| JW2249(yfbG) | | 2373570 | 2375552 |
| JW2250(380#2) | | 2375549 | 2376439 |
| JW2251(380#3) | | 2376439 | 2378091 |
| JW2252(380#4) | | 2378088 | 2378423 |
| JW2253(380#5) | | 2378141 | 2378809 |
| JW2254(pmrD) | Complementary strand | 2378803 | 2379069 |
| JW2255(menE) | Complementary strand | 2379179 | 2380534 |
| JW2256(menC) | Complementary strand | 2380531 | 2381493 |
| JW2257(menB) | Complementary strand | 2381493 | 2382350 |
| JW2258(yfbB) | Complementary strand | 2382365 | 2383123 |
| JW2259(menD) | Complementary strand | 2383120 | 2384994 |
| JW2260(menF) | Complementary strand | 2384879 | 2386174 |
| JW2261(elaB) | Complementary strand | 2386253 | 2386558 |
| JW2262(elaA) | Complementary strand | 2386613 | 2387074 |
| JW2263(elaC) | | 2387139 | 2388056 |
| JW2264(elaD) | | 2388247 | 2389455 |
| JW2265(yfbK) | Complementary strand | 2389526 | 2391253 |
| JW2266(yfbL) | | 2391391 | 2392362 |
| JW2267(yfbM) | | 2392465 | 2392968 |
| JW2268(yfbN) | Complementary strand | 2393241 | 2393957 |
| JW2269(403#0.1) | | 2394112 | 2394588 |
| JW2270(403#1) | | 2394644 | 2395495 |
| JW2271(nuoN) | Complementary strand | 2395579 | 2396856 |
| JW2272(nuoM) | Complementary strand | 2397043 | 2398572 |
| JW2273(nuoL) | Complementary strand | 2398736 | 2400577 |
| JW2274(nuoK) | Complementary strand | 2400574 | 2400876 |
| JW2275(nuoJ) | Complementary strand | 2400873 | 2401427 |
| JW2276(nuoI) | Complementary strand | 2401439 | 2401981 |
| JW2277(nuoH) | Complementary strand | 2401996 | 2402973 |
| JW2278(nuoG) | Complementary strand | 2402970 | 2405702 |
| JW2279(nuoF) | Complementary strand | 2405749 | 2407086 |
| JW2280(nuoE) | Complementary strand | 2407083 | 2407583 |
| JW2281(nuoD) | Complementary strand | 2407586 | 2408809 |
| JW2282(nuoB) | Complementary strand | 2409482 | 2410144 |
| JW2283(nuoA) | Complementary strand | 2410160 | 2410603 |
| JW2284(lrhA) | Complementary strand | 2411234 | 2412172 |
| JW2285(insB) | Complementary strand | 2412334 | 2412837 |
| JW2286(insA) | Complementary strand | 2412756 | 2413031 |
| JW2287(yfbQ) | | 2413868 | 2415085 |
| JW2288(404#8) | | 2415169 | 2415768 |
| JW2289(yfbS) | Complementary strand | 2415827 | 2417659 |
| JW2290(yfbT) | Complementary strand | 2417746 | 2418414 |
| JW2291(yfbU) | Complementary strand | 2418407 | 2418901 |
| JW2292(405#4) | Complementary strand | 2418984 | 2419439 |
| JW2293(ackA) | | 2419777 | 2420979 |
| JW2294(pta) | | 2421054 | 2423198 |
| JW2295(yfcC) | | 2423388 | 2424908 |
| JW2296(406#2) | Complementary strand | 2424941 | 2425483 |
| JW2297(yfcE) | Complementary strand | 2425541 | 2426092 |
| JW2298(yfcF) | Complementary strand | 2426148 | 2426792 |
| JW2299(yfcG) | | 2426928 | 2427575 |
| JW2300(folX) | | 2427632 | 2427994 |
| JW2301(406#7) | | 2428015 | 2428908 |
| JW2302(yfcI) | Complementary strand | 2428956 | 2429846 |
| JW2303(hisP) | Complementary strand | 2430043 | 2430816 |
| JW2304(hisM) | Complementary strand | 2430824 | 2431540 |
| JW2305(hisQ) | Complementary strand | 2431537 | 2432223 |
| JW2306(hisJ) | Complementary strand | 2432313 | 2433095 |
| JW2307(argT) | Complementary strand | 2433316 | 2434098 |
| JW2308(ubiX) | Complementary strand | 2434364 | 2434933 |
| JW2309(purF) | Complementary strand | 2435028 | 2436545 |
| JW2310(dedE) | Complementary strand | 2436582 | 2437070 |
| JW2311(dedD) | Complementary strand | 2437329 | 2437964 |
| JW2312(folC) | Complementary strand | 2437981 | 2439249 |
| JW2313(accD) | Complementary strand | 2439319 | 2440233 |
| JW2314(dedA) | Complementary strand | 2440389 | 2441048 |
| JW2315(truA) | Complementary strand | 2441131 | 2441943 |
| JW2316(usg1) | Complementary strand | 2441943 | 2442956 |
| JW2317(pdxB) | Complementary strand | 2443022 | 2444158 |
| JW2318(div) | | 2444257 | 2445252 |
| JW2319(yhhS) | Complementary strand | 2445249 | 2446427 |
| JW2320(fabB) | Complementary strand | 2446692 | 2447912 |
| JW2321(ddpX) | | 2448011 | 2450077 |
| JW2322(408#3) | Complementary strand | 2450198 | 2450476 |
| JW2323(yfcM) | Complementary strand | 2450510 | 2451244 |
| JW2324(yfcA) | Complementary strand | 2451058 | 2451867 |
| JW2325(mepA) | Complementary strand | 2451867 | 2452691 |
| JW2326(aroC) | Complementary strand | 2452695 | 2453780 |
| JW2327(yfcB) | Complementary strand | 2453815 | 2455080 |
| JW2328(yfcN) | | 2454913 | 2455464 |
| JW2329(409#4) | Complementary strand | 2455535 | 2456356 |
| JW2330(409#5) | Complementary strand | 2456358 | 2456897 |
| JW2331(409#6) | Complementary strand | 2456894 | 2457382 |
| JW2332(409#7) | Complementary strand | 2457379 | 2457891 |
| JW2333(yfcS) | Complementary strand | 2457891 | 2458643 |
| JW2334(yfcU) | Complementary strand | 2458663 | 2459559 |
| JW2335(yfcU) | Complementary strand | 2459572 | 2461308 |
| JW2336(409#10) | Complementary strand | 2461390 | 2461953 |
| JW2337(sixA) | Complementary strand | 2462634 | 2463119 |
| JW2338(yfcX) | Complementary strand | 2463322 | 2465466 |
| JW2339(yfcY) | Complementary strand | 2465466 | 2466776 |
| JW2340(yfcZ) | Complementary strand | 2466957 | 2467241 |
| JW2341(fadL) | | 2467607 | 2468953 |
| JW2342(410#5.1) | | 2469319 | 2470377 |
| JW2343(vacJ) | Complementary strand | 2470559 | 2471314 |
| JW2344(yfdC) | | 2471608 | 2472540 |
| JW2345(yfdB) | | 2472852 | 2474009 |
| JW2346(411#1) | | 2474162 | 2474524 |
| JW2347(yfdH) | | 2474521 | 2475441 |
| JW2348(411#2.1) | Complementary strand | 2475431 | 2475565 |
| JW2349(ycfA) | | 2477068 | 2477412 |
| JW2350(yfdK) | Complementary strand | 2477384 | 2477824 |
| JW2351(yfdL) | Complementary strand | 2477851 | 2478543 |
| JW2352(yfdM) | Complementary strand | 2478419 | 2478694 |
| JW2353(xylU) | | 2478738 | 2478923 |
| JW2354(yfdN) | Complementary strand | 2478694 | 2479182 |
| JW2355(yfdO) | Complementary strand | 2479185 | 2479553 |
| JW2356(411#10) | | 2479827 | 2480273 |
| JW2357(411#11) | | 2480339 | 2481163 |
| JW2358(411#12) | | 2481291 | 2481827 |
| JW2359(411#13) | | 2481818 | 2482180 |
| JW2360(411#14) | | 2482180 | 2482485 |
| JW2361(dsdC) | Complementary strand | 2483001 | 2483936 |
| JW2362(dsdX) | | 2484154 | 2485491 |
| JW2363(dsdA) | | 2485509 | 2486837 |
| JW2364(emrY) | Complementary strand | 2486945 | 2488483 |
| JW2365(emrK) | Complementary strand | 2488483 | 2489646 |
| JW2366(evgA) | | 2490062 | 2490676 |
| JW2367(evgS) | | 2490681 | 2494274 |
| JW2368(bifF) | Complementary strand | 2494330 | 2495475 |
| JW2369(413#2.1) | Complementary strand | 2495549 | 2496493 |
| JW2370(yfdU) | Complementary strand | 2496563 | 2498257 |
| JW2371(414#1) | Complementary strand | 2498311 | 2499561 |
| JW2372(414#2) | Complementary strand | 2500074 | 2500709 |
| JW2373(ypdI) | | 2501005 | 2501280 |
| JW2374(414#3) | Complementary strand | 2501357 | 2501599 |
| JW2375(ddg) | | 2501952 | 2502872 |
| JW2376(yfdZ) | Complementary strand | 2503364 | 2504602 |
| JW2377(yehU) | | 2504996 | 2506675 |
| JW2378(414#7) | | 2506690 | 2507424 |
| JW2379(yijO) | | 2507437 | 2508294 |
| JW2380(ptsA) | Complementary strand | 2508297 | 2510792 |
| JW2381(frvX) | Complementary strand | 2510817 | 2511854 |
| JW2382(yqhT) | Complementary strand | 2511854 | 2512939 |
| JW2383(ptwC) | Complementary strand | 2512954 | 2514201 |
| JW2384(ptwB) | Complementary strand | 2514223 | 2514600 |
| JW2385(glk) | Complementary strand | 2514768 | 2515733 |
| JW2386(416#3) | | 2515937 | 2517193 |
| JW2387(416#4) | | 2517308 | 2517634 |
| JW2388(mntH) | Complementary strand | 2517775 | 2519013 |
| JW2389(nupC) | | 2519349 | 2520551 |
| JW2390(yi81) | | 2520638 | 2521750 |
| JW2391(yi82) | Complementary strand | 2521062 | 2521370 |
| JW2392(yffA) | Complementary strand | 2521950 | 2524199 |
| JW2393(yfeC) | | 2524774 | 2525118 |
| JW2394(yfeD) | | 2525120 | 2525512 |
| JW2395(gltX) | Complementary strand | 2525564 | 2526979 |
| JW2396(xapR) | Complementary strand | 2527900 | 2528784 |
| JW2397(xapB) | Complementary strand | 2529036 | 2530292 |
| JW2398(xapA) | Complementary strand | 2530352 | 2531185 |
| JW2399(yfeN) | | 2531434 | 2532198 |
| JW2400(yfeR) | Complementary strand | 2532237 | 2533163 |
| JW2401(yfeH) | | 2533253 | 2534299 |
| JW2402(417#10) | Complementary strand | 2534318 | 2534557 |
| JW2403(lig) | Complementary strand | 2534466 | 2536481 |
| JW2404(zipA) | Complementary strand | 2536552 | 2537538 |
| JW2405(417#12.1) | | 2537070 | 2537312 |
| JW2406(cysZ) | | 2537769 | 2538530 |
| JW2407(cysK) | | 2538715 | 2539686 |
| JW2408(ptsH) | | 2540070 | 2540327 |
| JW2409(ptsI) | | 2540372 | 2542099 |
| JW2410(gsr) | | 2542140 | 2542649 |
| JW2411(pdxK) | Complementary strand | 2542692 | 2543543 |
| JW2412(yfeK) | | 2543648 | 2544022 |
| JW2413(419#2) | | 2544055 | 2544789 |
| JW2414(cysM) | Complementary strand | 2544978 | 2545889 |
| JW2415(cysA) | Complementary strand | 2546023 | 2547120 |
| JW2416(cysW) | Complementary strand | 2547110 | 2547985 |
| JW2417(cysU) | Complementary strand | 2547985 | 2548818 |
| JW2418(cysP) | Complementary strand | 2548818 | 2549834 |
| JW2419(ucpA) | Complementary strand | 2550138 | 2550995 |
| JW2420(yfeT) | Complementary strand | 2551058 | 2551915 |
| JW2421(yfeU) | | 2552079 | 2552975 |
| JW2422(ptbA) | | 2552979 | 2554403 |
| JW2423(yfeW) | | 2554321 | 2555712 |
| JW2424(420#4) | Complementary strand | 2555952 | 2556851 |
| JW2425(420#5) | Complementary strand | 2556947 | 2557522 |
| JW2426(yfeZ) | Complementary strand | 2557583 | 2558032 |
| JW2427(420#7) | Complementary strand | 2558019 | 2558444 |
| JW2428(amiA) | | 2558658 | 2559527 |
| JW2429(hemF) | | 2559531 | 2560430 |
| JW2430(yfeG) | Complementary strand | 2560436 | 2561488 |
| JW2431(cchA) | Complementary strand | 2561534 | 2562034 |
| JW2432(421#4) | Complementary strand | 2562047 | 2562706 |
| JW2433(eutC) | Complementary strand | 2562716 | 2563603 |
| JW2434(eutB) | Complementary strand | 2563624 | 2564985 |
| JW2435(421#7) | Complementary strand | 2564997 | 2566400 |
| JW2436(eutH) | Complementary strand | 2566397 | 2567623 |
| JW2437(eutG) | Complementary strand | 2567840 | 2569027 |
| JW2438(eutJ) | Complementary strand | 2569017 | 2569853 |
| JW2439(eutE) | Complementary strand | 2569864 | 2571267 |
| JW2440(cchB) | Complementary strand | 2571279 | 2571566 |
| JW2441(cchA) | Complementary strand | 2571673 | 2571966 |
| JW2442(eutI) | Complementary strand | 2572005 | 2573021 |
| JW2443(421#15) | Complementary strand | 2573018 | 2573821 |
| JW2444(421#16) | Complementary strand | 2573818 | 2574519 |
| JW2445(421#17) | Complementary strand | 2574494 | 2574973 |
| JW2446(ypfE) | Complementary strand | 2574986 | 2575321 |
| JW2447(421#19) | Complementary strand | 2575614 | 2577893 |
| JW2448(talA) | | 2578182 | 2579132 |
| JW2449(tktB) | | 2579152 | 2581155 |
| JW2450(ypfG) | Complementary strand | 2581250 | 2582293 |
| JW2451(yffH) | Complementary strand | 2582419 | 2582994 |
| JW2452(aegA) | Complementary strand | 2583062 | 2585041 |
| JW2453(narQ) | | 2585247 | 2586947 |
| JW2454(acrD) | | 2587111 | 2590224 |
| JW2455(yffB) | | 2590763 | 2591119 |
| JW2456(dapE) | | 2591123 | 2592250 |
| JW2457(423#3) | | 2592278 | 2592478 |
| JW2458(ypfH) | Complementary strand | 2592588 | 2593310 |
| JW2459(ypfI) | Complementary strand | 2593360 | 2595375 |
| JW2460(423#6) | Complementary strand | 2595390 | 2596253 |
| JW2461(purC) | Complementary strand | 2596421 | 2597134 |
| JW2462(nlpB) | Complementary strand | 2597347 | 2598381 |
| JW2463(dapA) | Complementary strand | 2598398 | 2599276 |
| JW2464(gcvR) | | 2599422 | 2599994 |
| JW2465(bcp) | | 2599994 | 2600464 |
| JW2466(hyfA) | | 2600717 | 2601334 |
| JW2467(hyfB) | | 2601334 | 2603352 |
| JW2468(hyfC) | | 2603363 | 2604310 |
| JW2469(hyfD) | | 2604327 | 2605766 |
| JW2470(hyfE) | | 2605778 | 2606428 |
| JW2471(hyfF) | | 2606433 | 2608013 |
| JW2472(hyfG) | | 2608003 | 2609670 |
| JW2473(hyfH) | | 2609680 | 2610225 |
| JW2474(hyfI) | | 2610222 | 2610977 |
| JW2475(hyfJ) | | 2610974 | 2611387 |
| JW2476(hyfR) | | 2611417 | 2613429 |
| JW2477(focB) | | 2613451 | 2614299 |
| JW2478(perm) | Complementary strand | 2614337 | 2615398 |
| JW2479(426#2.1) | | 2615611 | 2617074 |
| JW2480(yfgD) | | 2617095 | 2617454 |
| JW2481(yfgE) | Complementary strand | 2617592 | 2618185 |
| JW2482(uraA) | Complementary strand | 2618388 | 2619677 |
| JW2483(upp) | Complementary strand | 2619763 | 2620389 |
| JW2484(purM) | | 2620714 | 2621751 |
| JW2485(purN) | | 2621751 | 2622389 |
| JW2486(ppk) | | 2622561 | 2624627 |
| JW2487(ppx) | | 2624632 | 2626173 |
| JW2488(427#1) | Complementary strand | 2626212 | 2628455 |
| JW2489(427#2) | | 2629312 | 2629827 |
| JW2490(427#3) | | 2629843 | 2630382 |
| JW2491(guaA) | Complementary strand | 2630475 | 2632052 |
| JW2492(guaB) | Complementary strand | 2632121 | 2633656 |
| JW2493(xseA) | | 2633749 | 2635119 |
| JW2494(yfgJ) | Complementary strand | 2635116 | 2635367 |
| JW2495(yfgK) | Complementary strand | 2635401 | 2636912 |
| JW2496(yfgL) | Complementary strand | 2636991 | 2638169 |
| JW2497(yfgM) | Complementary strand | 2638180 | 2638800 |
| JW2498(hisS) | Complementary strand | 2638818 | 2640092 |
| JW2499(gcpE) | Complementary strand | 2640203 | 2641321 |
| JW2500(yfgA) | Complementary strand | 2641348 | 2642361 |
| JW2501(yfgB) | Complementary strand | 2642646 | 2643800 |
| JW2502(ndk) | Complementary strand | 2643950 | 2644381 |
| JW2503(pbpC) | Complementary strand | 2644530 | 2646842 |
| JW2504(429#5) | Complementary strand | 2646843 | 2651804 |
| JW2505(sseA) | | 2652011 | 2652856 |
| JW2506(sseB) | Complementary strand | 2653674 | 2654315 |
| JW2507(pepB) | Complementary strand | 2654592 | 2655875 |
| JW2508(yfhJ) | Complementary strand | 2656053 | 2656253 |
| JW2509(fdx) | Complementary strand | 2656265 | 2656600 |
| JW2510(hscA) | Complementary strand | 2656602 | 2658452 |
| JW2511(hscB) | Complementary strand | 2658469 | 2658984 |
| JW2512(yfhF) | Complementary strand | 2659080 | 2659403 |
| JW2513(iscU) | Complementary strand | 2659420 | 2659806 |
| JW2514(iscS) | Complementary strand | 2659834 | 2661048 |
| JW2515(iscR) | Complementary strand | 2661160 | 2661648 |
| JW2516(yfhQ) | Complementary strand | 2662100 | 2662840 |
| JW2517(suhB) | | 2662959 | 2663762 |
| JW2518(431#2) | | 2663880 | 2664761 |
| JW2519(csiE) | | 2664952 | 2666343 |
| JW2520(yfhS) | Complementary strand | 2666225 | 2667364 |
| JW2521(yfhT) | Complementary strand | 2667524 | 2668414 |
| JW2522(dgxA) | | 2668550 | 2669911 |
| JW2523(dgxB) | | 2669908 | 2670426 |
| JW2524(hcaC) | | 2670426 | 2670746 |
| JW2525(hcaB) | | 2670743 | 2671555 |
| JW2526(hcaD) | | 2671565 | 2672767 |
| JW2527(yphA) | | 2672792 | 2673286 |
| JW2528(yphB) | Complementary strand | 2673334 | 2674206 |
| JW2529(yphC) | Complementary strand | 2674218 | 2675312 |
| JW2530(yphD) | Complementary strand | 2675345 | 2676343 |
| JW2531(yphE) | Complementary strand | 2676368 | 2677879 |
| JW2532(yphF) | Complementary strand | 2677902 | 2678885 |
| JW2533(yphG) | Complementary strand | 2678982 | 2682356 |
| JW2534(yphH) | | 2682375 | 2683574 |
| JW2535(glyA) | Complementary strand | 2683772 | 2685025 |
| JW2536(hmpA) | | 2685353 | 2686543 |
| JW2537(glnB) | Complementary strand | 2686588 | 2686926 |
| JW2538(yfhA) | Complementary strand | 2686987 | 2688321 |
| JW2539(yfhG) | Complementary strand | 2688311 | 2689024 |
| JW2540(yfhK) | Complementary strand | 2689189 | 2690571 |
| JW2541(purL) | Complementary strand | 2691174 | 2695061 |
| JW2542(yfhD) | | 2695457 | 2696875 |
| JW2543(yfhC) | Complementary strand | 2696872 | 2697408 |
| JW2544(yfhB) | Complementary strand | 2697433 | 2698005 |
| JW2545(yfhH) | | 2698277 | 2699125 |
| JW2546(yfhL) | | 2699181 | 2699441 |
| JW2547(acpS) | Complementary strand | 2700136 | 2700516 |
| JW2548(pdxJ) | Complementary strand | 2700516 | 2701247 |
| JW2549(recO) | Complementary strand | 2701259 | 2701987 |
| JW2550(era) | Complementary strand | 2701999 | 2702904 |
| JW2551(rnc) | Complementary strand | 2702901 | 2703581 |
| JW2552(lepB) | Complementary strand | 2703853 | 2704827 |
| JW2553(lepA) | Complementary strand | 2704843 | 2706642 |
| JW2554(rseC) | Complementary strand | 2706840 | 2707319 |
| JW2555(rseB) | Complementary strand | 2707316 | 2708272 |
| JW2556(rseA) | Complementary strand | 2708272 | 2708922 |
| JW2557(rpoE) | Complementary strand | 2708955 | 2709530 |
| JW2558(nadB) | | 2709938 | 2711560 |
| JW2559(yfiC) | Complementary strand | 2711545 | 2712282 |
| JW2560(srmB) | | 2712414 | 2713748 |
| JW2561(yfiE) | Complementary strand | 2713957 | 2714838 |
| JW2562(yfiK) | | 2714941 | 2715528 |
| JW2563(yfiD) | Complementary strand | 2715584 | 2715967 |
| JW2564(ung) | | 2716272 | 2716961 |
| JW2565(yfiF) | Complementary strand | 2717009 | 2718046 |
| JW2566(trx2) | | 2718253 | 2718672 |
| JW2567(yfiP) | | 2718717 | 2719439 |
| JW2568(yfiQ) | | 2719471 | 2722131 |
| JW2569(pssA) | | 2722245 | 2723600 |
| JW2570(yfiM) | | 2723697 | 2723969 |
| JW2571(kgtP) | Complementary strand | 2723966 | 2725264 |
| JW2572(437#4) | | 2725443 | 2725505 |
| JW2573(clpB) | Complementary strand | 2731118 | 2733691 |
| JW2574(437#6.1) | | 2733777 | 2733875 |
| JW2575(yfiH) | Complementary strand | 2733821 | 2734552 |
| JW2576(rluD) | Complementary strand | 2734549 | 2735529 |
| JW2577(yfiO) | | 2735664 | 2736401 |
| JW2578(yfiA) | | 2736672 | 2737013 |
| JW2579(pheL) | | 2737117 | 2737164 |
| JW2580(pheA) | | 2737263 | 2738423 |
| JW2581(tyrA) | Complementary strand | 2738466 | 2739587 |
| JW2582(aroF) | Complementary strand | 2739598 | 2740668 |
| JW2583(yfiL) | | 2740839 | 2741243 |
| JW2584(yfiR) | | 2741393 | 2741911 |
| JW2585(yfiN) | | 2741901 | 2743127 |
| JW2586(yfiB) | | 2743143 | 2743625 |
| JW2587(rplS) | Complementary strand | 2743701 | 2744048 |
| JW2588(trmD) | Complementary strand | 2744090 | 2744857 |
| JW2589(rimM) | Complementary strand | 2744888 | 2745445 |
| JW2590(rpsP) | Complementary strand | 2745455 | 2745703 |
| JW2591(ffh) | Complementary strand | 2745952 | 2747058 |
| JW2592(439#12) | | 2747405 | 2748271 |
| JW2593(yfjD) | | 2748337 | 2749578 |
| JW2594(grpE) | Complementary strand | 2749633 | 2750226 |
| JW2595(439#15) | Complementary strand | 2750223 | 2750396 |
| JW2596(yfjB) | | 2750349 | 2751227 |
| JW2597(recN) | | 2751313 | 2752974 |
| JW2598(smpA) | | 2753123 | 2753464 |
| JW2599(yfjF) | Complementary strand | 2753526 | 2753816 |
| JW2600(yfjG) | Complementary strand | 2753806 | 2754282 |
| JW2601(smpB) | | 2754414 | 2754896 |
| JW2602(intA) | | 2755677 | 2756918 |
| JW2603(yfjH) | Complementary strand | 2757162 | 2758118 |
| JW2604(alpA) | | 2758162 | 2758374 |
| JW2605(yfjI) | | 2758503 | 2759912 |
| JW2606(440#5.1) | Complementary strand | 2759865 | 2760071 |
| JW2607(yfjJ) | | 2760065 | 2760691 |
| JW2608(yfjK) | Complementary strand | 2760869 | 2763058 |
| JW2609(yfjL) | Complementary strand | 2763055 | 2764671 |
| JW2610(yfjM) | Complementary strand | 2765031 | 2765294 |
| JW2611(yfjN) | | 2765436 | 2766509 |
| JW2612(yfjO) | | 2766553 | 2766873 |
| JW2613(yfjP) | | 2767222 | 2768091 |
| JW2614(yfjQ) | | 2768183 | 2769004 |
| JW2615(yfjR) | | 2769221 | 2769922 |
| JW2616(ypjK) | | 2769807 | 2770199 |
| JW2617(yfjS) | | 2769950 | 2770642 |
| JW2618(yfjT) | | 2770666 | 2771133 |
| JW2619(yfjU) | Complementary strand | 2771358 | 2771672 |
| JW2620(yfjV) | Complementary strand | 2771685 | 2772278 |
| JW2621(yfjV) | Complementary strand | 2772354 | 2772554 |
| JW2622(442#2.2) | Complementary strand | 2772494 | 2772610 |
| JW2623(yfjW) | | 2772836 | 2774539 |
| JW2623.5(442#4) | | 2775237 | 2775440 |
| JW2624(yfjX) | | 2775437 | 2775895 |
| JW2625(yfjY) | | 2775904 | 2776386 |
| JW2626(yfjZ) | | 2776633 | 2776950 |
| JW2627(ypjF) | | 2776971 | 2777300 |
| JW2628(ypjA) | Complementary strand | 2777664 | 2782373 |
| JW2629(443#1.1) | Complementary strand | 2783156 | 2783947 |
| JW2630(443#1.2) | Complementary strand | 2784047 | 2784445 |
| JW2631(443#2) | | 2786266 | 2786952 |
| JW2632(443#2.1) | | 2787343 | 2787756 |
| JW2633(443#2.2) | | 2787895 | 2788167 |
| JW2634(443#3) | | 2788398 | 2789480 |
| JW2635(ygaF) | | 2789500 | 2790768 |
| JW2636(gabD) | | 2790791 | 2792239 |
| JW2637(gabT) | | 2792253 | 2793533 |
| JW2638(gabP) | | 2793771 | 2795171 |
| JW2639(ygaE) | | 2795192 | 2795854 |
| JW2640(yzzM) | Complementary strand | 2795855 | 2796304 |
| JW2641(yqaE) | Complementary strand | 2796388 | 2796546 |
| JW2642(445#2) | | 2796729 | 2797028 |
| JW2643(ygaP) | | 2797038 | 2797562 |
| JW2644(stpA) | Complementary strand | 2797609 | 2798013 |
| JW2645(445#5) | | 2798682 | 2799131 |
| JW2646(ygaC) | Complementary strand | 2799168 | 2799512 |
| JW2647(ygaM) | | 2799652 | 2799993 |
| JW2648(nrdH) | | 2800241 | 2800486 |
| JW2649(nrdI) | | 2800483 | 2800893 |
| JW2650(nrdE) | | 2800866 | 2803010 |
| JW2651(nrdF) | | 2803020 | 2803979 |
| JW2652(proV) | | 2804333 | 2805535 |
| JW2653(proW) | | 2805528 | 2806592 |
| JW2654(proX) | | 2806650 | 2807642 |
| JW2655(445#15) | | 2807834 | 2808100 |
| JW2656(445#17) | | 2808094 | 2809011 |
| JW2657(ygaZ) | | 2809135 | 2809872 |
| JW2658(ygaH) | | 2809862 | 2810197 |
| JW2659(emrR) | | 2810288 | 2810818 |
| JW2660(emrA) | | 2810945 | 2812117 |
| JW2661(emrB) | | 2812134 | 2813672 |
| JW2662(ygaG) | Complementary strand | 2813736 | 2814251 |
| JW2663(gshA) | Complementary strand | 2814401 | 2815957 |
| JW2664(yqaA) | Complementary strand | 2816030 | 2816458 |
| JW2665(yqaB) | Complementary strand | 2816455 | 2817021 |
| JW2666(csrA) | Complementary strand | 2818479 | 2818664 |
| JW2667(alaS) | Complementary strand | 2818899 | 2821529 |
| JW2668(oraA) | Complementary strand | 2821657 | 2822157 |
| JW2669(recA) | Complementary strand | 2822226 | 2823287 |
| JW2670(ygaD) | Complementary strand | 2823367 | 2823864 |
| JW2671(mltB) | Complementary strand | 2824009 | 2825094 |
| JW2672(srlA) | | 2825350 | 2826870 |
| JW2673(srlB) | | 2826881 | 2827252 |
| JW2674(srlD) | | 2827256 | 2828035 |
| JW2675(gutM) | | 2828141 | 2828500 |
| JW2676(srlR) | | 2828567 | 2829340 |
| JW2677(gutQ) | | 2829372 | 2830298 |
| JW2678(ygaA) | Complementary strand | 2830295 | 2830807 |
| JW2679(ygaA) | Complementary strand | 2830827 | 2831885 |
| JW2680(448#2) | | 2831997 | 2833436 |
| JW2681(ygbD) | | 2833433 | 2834566 |
| JW2682(hypF) | Complementary strand | 2834694 | 2836946 |
| JW2683(hydN) | Complementary strand | 2837099 | 2837626 |
| JW2684(ascG) | Complementary strand | 2837775 | 2838785 |
| JW2685(ascF) | | 2839045 | 2840502 |
| JW2686(ascB) | | 2840511 | 2841935 |
| JW2687(hycI) | Complementary strand | 2842094 | 2842564 |
| JW2688(hycH) | Complementary strand | 2842557 | 2842967 |
| JW2689(hycG) | Complementary strand | 2842964 | 2843731 |
| JW2690(hycF) | Complementary strand | 2843731 | 2844273 |
| JW2691(hycE) | Complementary strand | 2844283 | 2845992 |
| JW2692(hycD) | Complementary strand | 2846010 | 2846933 |
| JW2693(hycC) | Complementary strand | 2846936 | 2848762 |
| JW2694(hycB) | Complementary strand | 2848759 | 2849370 |
| JW2695(hycA) | Complementary strand | 2849495 | 2849956 |
| JW2696(hypA) | | 2850168 | 2850518 |
| JW2697(hypB) | | 2850522 | 2851394 |
| JW2698(hypC) | | 2851385 | 2851657 |
| JW2699(hypD) | | 2851657 | 2852778 |
| JW2700(hypE) | | 2852817 | 2853785 |
| JW2701(fhlA) | | 2853859 | 2855937 |
| JW2702(ygbA) | Complementary strand | 2855974 | 2856327 |
| JW2703(mutS) | | 2856614 | 2859175 |
| JW2704(prpB) | | 2859281 | 2859937 |
| JW2705(ygbI) | Complementary strand | 2859988 | 2860785 |
| JW2706(ygbJ) | | 2860952 | 2861860 |
| JW2707(ygbK) | | 2861857 | 2863023 |
| JW2708(ygbL) | | 2863115 | 2863753 |
| JW2709(ygbM) | | 2863758 | 2864534 |
| JW2710(ygbN) | | 2864623 | 2865987 |
| JW2711(rpoS) | Complementary strand | 2866081 | 2867073 |
| JW2712(nlpD) | Complementary strand | 2867136 | 2868275 |
| JW2713(pcm) | Complementary strand | 2868415 | 2869041 |
| JW2714(surE) | Complementary strand | 2869035 | 2869796 |
| JW2715(ygbO) | Complementary strand | 2869777 | 2870826 |
| JW2716(ygbB) | Complementary strand | 2870823 | 2871302 |
| JW2717(ygbP) | Complementary strand | 2871302 | 2872012 |
| JW2718(ygbQ) | Complementary strand | 2872031 | 2872342 |
| JW2719(ygbE) | Complementary strand | 2872534 | 2872857 |
| JW2720(cysC) | Complementary strand | 2872907 | 2873512 |
| JW2721(cysN) | Complementary strand | 2873512 | 2874939 |
| JW2722(cysD) | Complementary strand | 2874941 | 2875849 |
| JW2723(iap) | | 2876101 | 2877138 |
| JW2724(ygbF) | Complementary strand | 2878089 | 2878439 |
| JW2725(452#12) | Complementary strand | 2878375 | 2879292 |
| JW2726(ygcH) | Complementary strand | 2879308 | 2879907 |
| JW2727(452#14) | Complementary strand | 2879894 | 2880568 |
| JW2728(ygcJ) | Complementary strand | 2880571 | 2881662 |
| JW2729(ygcK) | Complementary strand | 2881675 | 2882157 |
| JW2730(453#2) | Complementary strand | 2882150 | 2883658 |
| JW2731(ygcB) | Complementary strand | 2884073 | 2886739 |
| JW2732(cysH) | Complementary strand | 2887098 | 2887832 |
| JW2733(cysI) | Complementary strand | 2887907 | 2889619 |
| JW2734(cysJ) | Complementary strand | 2889619 | 2891418 |
| JW2735(ptpS) | | 2891734 | 2892099 |
| JW2736(ygcN) | | 2892177 | 2893448 |
| JW2737(ygcO) | | 2893439 | 2893699 |
| JW2738(ygcP) | | 2893716 | 2894291 |
| JW2739(ygcQ) | Complementary strand | 2894439 | 2895332 |
| JW2740(ygcR) | Complementary strand | 2895366 | 2896076 |
| JW2741(ygcS) | Complementary strand | 2896054 | 2897463 |
| JW2742(454#9) | Complementary strand | 2897485 | 2898279 |
| JW2743(ygcU) | Complementary strand | 2898282 | 2898647 |
| JW2744(ygcU) | Complementary strand | 2898656 | 2898937 |
| JW2745(ygcW) | Complementary strand | 2899007 | 2899867 |
| JW2746(yqcE) | | 2900111 | 2901388 |
| JW2747(ygcE) | | 2901769 | 2902893 |
| JW2748(ygcF) | Complementary strand | 2904267 | 2904938 |
| JW2749(ygcG) | | 2905162 | 2906103 |
| JW2750(eno) | Complementary strand | 2906163 | 2907461 |
| JW2751(pyrG) | Complementary strand | 2907549 | 2909186 |
| JW2752(mazG) | Complementary strand | 2909414 | 2910205 |
| JW2753(chpA) | Complementary strand | 2910276 | 2910611 |
| JW2754(chpR) | Complementary strand | 2910611 | 2910859 |
| JW2755(relA) | Complementary strand | 2910937 | 2913171 |
| JW2756(ygcA) | Complementary strand | 2913219 | 2914520 |
| JW2757(barA) | | 2914577 | 2917333 |
| JW2758(ygcX) | Complementary strand | 2917565 | 2918905 |
| JW2759(gud2) | Complementary strand | 2918926 | 2920266 |
| JW2760(gudT) | Complementary strand | 2920268 | 2921620 |
| JW2761(mioC) | Complementary strand | 2922055 | 2922504 |
| JW2762(yqcB) | Complementary strand | 2922522 | 2923304 |
| JW2763(yqcC) | Complementary strand | 2923304 | 2923633 |
| JW2764(syd) | Complementary strand | 2924255 | 2924800 |
| JW2765(yqcD) | | 2924868 | 2925716 |
| JW2766(ygdH) | | 2925828 | 2927192 |
| JW2767(sdaC) | | 2927749 | 2929038 |
| JW2768(sdaB) | | 2929096 | 2930463 |
| JW2769(exo) | | 2930575 | 2931330 |
| JW2770(fucO) | Complementary strand | 2931385 | 2932536 |
| JW2771(fucA) | Complementary strand | 2932561 | 2933208 |
| JW2772(fucP) | | 2933755 | 2935071 |
| JW2773(fucI) | | 2935104 | 2936879 |
| JW2774(fucK) | | 2936958 | 2938406 |
| JW2775(fucU) | | 2938408 | 2938830 |
| JW2776(fucR) | | 2938888 | 2939619 |
| JW2777(ygdE) | Complementary strand | 2939663 | 2940763 |
| JW2778(ygdD) | Complementary strand | 2940756 | 2941151 |
| JW2779(gcvA) | Complementary strand | 2941170 | 2942087 |
| JW2780(ygdI) | Complementary strand | 2942438 | 2942668 |
| JW2781(nifS) | | 2942857 | 2944062 |
| JW2782(ygdK) | | 2944062 | 2944505 |
| JW2783(ygdL) | Complementary strand | 2944556 | 2945362 |
| JW2784(mltA) | Complementary strand | 2945601 | 2946698 |
| JW2785(amiC) | Complementary strand | 2947277 | 2948620 |
| JW2786(argA) | | 2948762 | 2950093 |
| JW2787(recD) | Complementary strand | 2950155 | 2951981 |
| JW2788(recB) | Complementary strand | 2951981 | 2955523 |
| JW2789(ptr) | Complementary strand | 2955516 | 2958404 |
| JW2790(recC) | Complementary strand | 2958580 | 2961948 |
| JW2791(ppdC) | Complementary strand | 2961961 | 2962284 |
| JW2792(ygdB) | Complementary strand | 2962269 | 2962634 |
| JW2793(ppdB) | Complementary strand | 2962673 | 2963476 |
| JW2794(ppdA) | Complementary strand | 2963227 | 2963697 |
| JW2795(thyA) | Complementary strand | 2963881 | 2964675 |
| JW2796(lgt) | Complementary strand | 2964682 | 2965557 |
| JW2797(ptsP) | Complementary strand | 2965708 | 2967954 |
| JW2798(ygdP) | Complementary strand | 2967967 | 2968497 |
| JW2799(mutH) | | 2969182 | 2969871 |
| JW2800(ygdQ) | | 2969940 | 2970653 |
| JW2801(ygdR) | | 2970791 | 2971009 |
| JW2802(tas) | | 2971117 | 2972157 |
| JW2803(ygeD) | Complementary strand | 2972189 | 2973382 |
| JW2804(aas) | Complementary strand | 2973375 | 2975534 |
| JW2805(galR) | | 2976119 | 2977150 |
| JW2806(lysA) | Complementary strand | 2977157 | 2978419 |
| JW2807(lysR) | | 2978541 | 2979476 |
| JW2808(ygeA) | Complementary strand | 2979463 | 2980155 |
| JW2809(araE) | Complementary strand | 2980284 | 2981702 |
| JW2810(kduD) | Complementary strand | 2982017 | 2982778 |
| JW2811(kduI) | Complementary strand | 2982808 | 2983644 |
| JW2812(yqeF) | Complementary strand | 2983931 | 2985115 |
| JW2813(sdaC) | | 2985367 | 2986596 |
| JW2814(yqeH) | | 2987023 | 2987688 |
| JW2815(yqeI) | | 2988022 | 2988831 |
| JW2816(yqeJ) | | 2988992 | 2989306 |
| JW2817(yqeK) | Complementary strand | 2989455 | 2989880 |
| JW2818(ygeF) | | 2990074 | 2990520 |
| JW2819(ygeG) | | 2990788 | 2991279 |
| JW2820(ygeH) | | 2991614 | 2992990 |
| JW2821(ygeI) | | 2993128 | 2993376 |
| JW2822(x) | | 2993520 | 2993936 |
| JW2823(ygeK) | Complementary strand | 2993981 | 2994427 |
| JW2824(464#6) | Complementary strand | 2994458 | 2994613 |
| JW2825(464#7) | Complementary strand | 2995269 | 2995523 |
| JW2826(yi22) | Complementary strand | 2995893 | 2996798 |
| JW2827(yi24) | | 2996322 | 2996753 |
| JW2828(yi23) | Complementary strand | 2996432 | 2996725 |
| JW2829(yi2A) | Complementary strand | 2996756 | 2997166 |
| JW2830(465#0.1) | | 2997078 | 2997245 |
| JW2831(ygeP) | Complementary strand | 2997210 | 2997509 |
| JW2832(465#1) | Complementary strand | 2997555 | 2998391 |
| JW2833(nlpD) | Complementary strand | 2998657 | 2999412 |
| JW2834(yagR) | | 2999827 | 3002124 |
| JW2835(ygeT) | | 3002135 | 3003013 |
| JW2836(465#5) | | 3003010 | 3003489 |
| JW2837(ygeV) | Complementary strand | 3003529 | 3005307 |
| JW2838(ygeW) | | 3005854 | 3006945 |
| JW2839(dpaL) | | 3007029 | 3008225 |
| JW2840(ygeY) | | 3008283 | 3009494 |
| JW2841(ygeZ) | | 3009547 | 3010932 |
| JW2842(arcL) | | 3010980 | 3011912 |
| JW2843(yqeB) | Complementary strand | 3012133 | 3013758 |
| JW2844(466#6) | Complementary strand | 3013806 | 3014477 |
| JW2845(ygfJ) | | 3014679 | 3015257 |
| JW2846(gltD) | | 3015579 | 3018677 |
| JW2847(467#1) | | 3018680 | 3020008 |
| JW2848(ygfM) | | 3020059 | 3020838 |
| JW2849(yagR) | | 3020835 | 3023705 |
| JW2850(ygfO) | | 3023870 | 3025270 |
| JW2851(ygfP) | | 3025165 | 3026604 |
| JW2852(ygfQ) | | 3026640 | 3027209 |
| JW2853(ygfR) | | 3027176 | 3028006 |
| JW2854(ygfS) | Complementary strand | 3028042 | 3028533 |
| JW2855(ygfT) | Complementary strand | 3028530 | 3030464 |
| JW2856(pbuX) | | 3030816 | 3032333 |
| JW2857(idi) | | 3032583 | 3033131 |
| JW2858(lysS) | Complementary strand | 3033175 | 3034692 |
| JW2859(prfB) | Complementary strand | 3034702 | 3035367 |
| JW2860(recJ) | Complementary strand | 3035891 | 3037624 |
| JW2861(dsbC) | Complementary strand | 3037630 | 3038340 |
| JW2862(xerD) | Complementary strand | 3038365 | 3039261 |
| JW2863(fldB) | | 3039373 | 3039894 |
| JW2864(ygfX) | Complementary strand | 3039934 | 3040341 |
| JW2865(ygfY) | Complementary strand | 3040322 | 3040588 |
| JW2866(up14) | | 3040831 | 3041811 |
| JW2867(yqfA) | Complementary strand | 3042007 | 3042666 |
| JW2868(yqfB) | Complementary strand | 3042830 | 3043141 |
| JW2869(bglA) | | 3043180 | 3044619 |
| JW2870(ygfF) | Complementary strand | 3044676 | 3045419 |
| JW2871(gcvP) | Complementary strand | 3045686 | 3048559 |
| JW2872(gcvH) | Complementary strand | 3048678 | 3049067 |
| JW2873(gcvT) | Complementary strand | 3049091 | 3050185 |
| JW2874(visC) | Complementary strand | 3050633 | 3051835 |
| JW2875(ubiH) | Complementary strand | 3051858 | 3053036 |
| JW2876(pepP) | Complementary strand | 3053033 | 3054358 |
| JW2877(ygfB) | Complementary strand | 3054384 | 3054968 |
| JW2878(ygfE) | | 3055130 | 3055459 |
| JW2879(ygfA) | | 3055759 | 3056307 |
| JW2880(serA) | Complementary strand | 3056696 | 3057928 |
| JW2881(rpiA) | Complementary strand | 3058184 | 3058879 |
| JW2882(yqfE) | Complementary strand | 3058899 | 3059129 |
| JW2883(iciA) | | 3059271 | 3060164 |
| JW2884(sbm) | | 3060368 | 3062512 |
| JW2885(argK) | | 3062505 | 3063500 |
| JW2886(ygfG) | | 3063511 | 3064296 |
| JW2887(ygfH) | | 3064320 | 3065798 |
| JW2888(ygfI) | Complementary strand | 3065795 | 3066706 |
| JW2889(yggE) | Complementary strand | 3066858 | 3067598 |
| JW2890(yggA) | Complementary strand | 3067691 | 3068326 |
| JW2891(yggB) | Complementary strand | 3068465 | 3069325 |
| JW2892(fba) | Complementary strand | 3069683 | 3070762 |
| JW2893(pgk) | Complementary strand | 3070977 | 3072140 |
| JW2894(epd) | Complementary strand | 3072190 | 3073209 |
| JW2895(yggC) | Complementary strand | 3073494 | 3074207 |
| JW2896(yggD) | Complementary strand | 3074204 | 3074713 |
| JW2897(yggF) | Complementary strand | 3074735 | 3075700 |
| JW2898(yggP) | Complementary strand | 3075697 | 3076686 |
| JW2899(yggP) | Complementary strand | 3076617 | 3076973 |
| JW2900(cmtA) | Complementary strand | 3076988 | 3078376 |
| JW2901(cmtB) | Complementary strand | 3078404 | 3078847 |
| JW2902(tktA) | Complementary strand | 3079161 | 3081155 |
| JW2903(yggG) | | 3081435 | 3082193 |
| JW2904(speB) | Complementary strand | 3082399 | 3083319 |
| JW2905(speA) | Complementary strand | 3083457 | 3085433 |
| JW2906(yqgB) | Complementary strand | 3085442 | 3085588 |
| JW2907(yqgC) | | 3085709 | 3085924 |
| JW2908(yqgD) | Complementary strand | 3085921 | 3086172 |
| JW2909(metK) | | 3086228 | 3087382 |
| JW2910(galP) | | 3087805 | 3089199 |
| JW2911(sprT) | | 3089276 | 3089773 |
| JW2912(endA) | | 3089868 | 3090575 |
| JW2913(yggJ) | | 3090655 | 3091386 |
| JW2914(gshB) | | 3091399 | 3092349 |
| JW2915(yqgE) | | 3092458 | 3093021 |
| JW2916(yqgF) | | 3093021 | 3093437 |
| JW2917(yggR) | Complementary strand | 3093621 | 3094601 |
| JW2918(yggS) | | 3094619 | 3095323 |
| JW2919(yggT) | | 3095341 | 3095907 |
| JW2920(yggU) | | 3095892 | 3096194 |
| JW2921(yggV) | | 3096202 | 3096795 |
| JW2922(yggW) | | 3096788 | 3097924 |
| JW2923(yggM) | Complementary strand | 3098079 | 3099086 |
| JW2924(ansB) | Complementary strand | 3099203 | 3100249 |
| JW2925(yggN) | Complementary strand | 3100425 | 3101144 |
| JW2926(yggL) | Complementary strand | 3101327 | 3101653 |
| JW2927(yggH) | Complementary strand | 3101653 | 3102372 |
| JW2928(mutY) | | 3102533 | 3103585 |
| JW2929(yggX) | | 3103613 | 3103888 |
| JW2930(mltC) | | 3103950 | 3104489 |
| JW2931(mltC) | | 3104536 | 3105033 |
| JW2932(nupG) | | 3105235 | 3106491 |
| JW2933(speC) | Complementary strand | 3106541 | 3108736 |
| JW2934(yqgA) | | 3109073 | 3109780 |
| JW2935(epsM) | Complementary strand | 3110110 | 3110646 |
| JW2936(exeL) | Complementary strand | 3110648 | 3111490 |
| JW2937(exeC) | Complementary strand | 3111574 | 3112569 |
| JW2938(477#5) | Complementary strand | 3112587 | 3112997 |
| JW2939(477#6) | Complementary strand | 3113063 | 3113872 |
| JW2940(477#7) | Complementary strand | 3114070 | 3116616 |
| JW2941(478#1) | Complementary strand | 3116604 | 3118631 |
| JW2942(yghK) | Complementary strand | 3119116 | 3120798 |
| JW2943(glcB) | Complementary strand | 3121153 | 3123324 |
| JW2944(glcG) | Complementary strand | 3123346 | 3123750 |
| JW2945(glcF) | Complementary strand | 3123755 | 3126040 |
| JW2946(glcD) | Complementary strand | 3126040 | 3127539 |
| JW2947(glcC) | | 3127790 | 3128554 |
| JW2948(502#6) | Complementary strand | 3128561 | 3129733 |
| JW2949(is5B) | | 3129696 | 3130712 |
| JW2950(yi51) | Complementary strand | 3130008 | 3130376 |
| JW2951(yghQ) | Complementary strand | 3130859 | 3131788 |
| JW2952(yghR) | Complementary strand | 3131972 | 3132730 |
| JW2953(yghS) | Complementary strand | 3132762 | 3133460 |
| JW2954(yghT) | | 3133649 | 3134341 |
| JW2955(pitB) | Complementary strand | 3134390 | 3135889 |
| JW2956(gsp) | Complementary strand | 3136181 | 3138040 |
| JW2957(yghU) | | 3138197 | 3139111 |
| JW2958(hybG) | Complementary strand | 3139234 | 3139482 |
| JW2959(hybF) | Complementary strand | 3139519 | 3139836 |
| JW2960(hybE) | Complementary strand | 3139829 | 3140317 |
| JW2961(hybD) | Complementary strand | 3140310 | 3140804 |
| JW2962(hybC) | Complementary strand | 3140804 | 3142507 |
| JW2963(hybB) | Complementary strand | 3142504 | 3143679 |
| JW2964(hybA) | Complementary strand | 3143669 | 3144655 |
| JW2965(hoxK) | Complementary strand | 3144658 | 3145776 |
| JW2966(yghW) | Complementary strand | 3145965 | 3146252 |
| JW2967(504#11) | Complementary strand | 3146371 | 3146781 |
| JW2968(504#12) | Complementary strand | 3146781 | 3147206 |
| JW2969(504#13) | Complementary strand | 3147112 | 3147300 |
| JW2970(yajO) | | 3147412 | 3148452 |
| JW2971(yqhA) | Complementary strand | 3148492 | 3148986 |
| JW2972(yghA) | | 3149177 | 3150061 |
| JW2973(exbD) | Complementary strand | 3150333 | 3150758 |
| JW2974(exbB) | Complementary strand | 3150765 | 3151499 |
| JW2975(metC) | | 3151751 | 3152938 |
| JW2976(yghB) | | 3153078 | 3153737 |
| JW2977(exsA) | Complementary strand | 3153776 | 3154903 |
| JW2978(yqhD) | | 3154869 | 3156032 |
| JW2979(yghE) | | 3156370 | 3156963 |
| JW2980(yqhG) | | 3157163 | 3157456 |
| JW2981(yqhG) | | 3157414 | 3158091 |
| JW2982(yqhH) | | 3158142 | 3158399 |
| JW2983(ygiQ) | Complementary strand | 3158442 | 3159683 |
| JW2984(ygiR) | Complementary strand | 3159683 | 3160660 |
| JW2985(sufI) | Complementary strand | 3160771 | 3162183 |
| JW2986(plsC) | Complementary strand | 3162258 | 3162995 |
| JW2987(parC) | Complementary strand | 3163229 | 3165487 |
| JW2988(ygiS) | Complementary strand | 3165625 | 3167232 |
| JW2989(ygiT) | Complementary strand | 3167365 | 3167760 |
| JW2990(ygiU) | Complementary strand | 3167762 | 3168058 |
| JW2991(506#5) | Complementary strand | 3168263 | 3168745 |
| JW2992(ygiW) | Complementary strand | 3168798 | 3169190 |
| JW2993(ygiX) | | 3169342 | 3170001 |
| JW2994(ygiY) | | 3169998 | 3171347 |
| JW2995(ygiZ) | Complementary strand | 3171393 | 3171725 |
| JW2996(mdaB) | | 3172045 | 3172626 |
| JW2997(ygiN) | | 3172657 | 3172971 |
| JW2998(parE) | Complementary strand | 3173019 | 3174911 |
| JW2999(yqiA) | Complementary strand | 3174940 | 3175521 |
| JW3000(icc) | Complementary strand | 3175521 | 3176348 |
| JW3001(yqiB) | Complementary strand | 3176373 | 3176795 |
| JW3002(yqiE) | Complementary strand | 3176796 | 3177425 |
| JW3003(tolC) | | 3177624 | 3179111 |
| JW3004(507#7) | | 3179111 | 3179371 |
| JW3005(ygiB) | | 3179226 | 3179930 |
| JW3006(ygiC) | | 3179936 | 3181096 |
| JW3007(ygiD) | Complementary strand | 3181134 | 3181949 |
| JW3008(ygiE) | | 3182065 | 3182838 |
| JW3009(ribB) | Complementary strand | 3183328 | 3183981 |
| JW3010(yqiC) | | 3184295 | 3184645 |
| JW3011(ygiL) | | 3184929 | 3185480 |
| JW3012(yi2A) | | 3185657 | 3186067 |
| JW3013(yi22) | | 3186025 | 3186930 |
| JW3014(yi24) | Complementary strand | 3186070 | 3186501 |
| JW3015(yi23) | | 3186098 | 3186391 |
| JW3016(yqiG) | | 3186915 | 3187859 |
| JW3017(yqiG) | | 3187684 | 3189381 |
| JW3018(yqiH) | | 3189388 | 3190146 |
| JW3019(yqiI) | | 3190148 | 3190855 |
| JW3020(yqiI) | | 3190791 | 3191213 |
| JW3021(glgS) | Complementary strand | 3191256 | 3191456 |
| JW3022(508#6) | | 3191725 | 3192354 |
| JW3023(508#7) | | 3192381 | 3194042 |
| JW3024(rfaE) | Complementary strand | 3194837 | 3196270 |
| JW3025(glnE) | Complementary strand | 3196318 | 3199158 |
| JW3026(ygiF) | Complementary strand | 3199181 | 3200482 |
| JW3027(ygiM) | | 3200724 | 3201344 |
| JW3028(cca) | | 3201408 | 3202646 |
| JW3029(bacA) | Complementary strand | 3202827 | 3203648 |
| JW3030(folB) | Complementary strand | 3203738 | 3204106 |
| JW3031(ygiH) | | 3204211 | 3204828 |
| JW3032(ygiP) | Complementary strand | 3204841 | 3205773 |
| JW3033(ttdA) | | 3205980 | 3206891 |
| JW3034(ttdB) | | 3206888 | 3207493 |
| JW3035(ygjE) | | 3207541 | 3209004 |
| JW3036(ygjD) | Complementary strand | 3209047 | 3210060 |
| JW3037(rpsU) | | 3210298 | 3210513 |
| JW3038(dnaG) | | 3210624 | 3212369 |
| JW3039(rpoD) | | 3212564 | 3214405 |
| JW3040(ygjF) | Complementary strand | 3214484 | 3214990 |
| JW3041(yqjH) | Complementary strand | 3215244 | 3216008 |
| JW3042(yqjI) | | 3216296 | 3216919 |
| JW3043(aer) | Complementary strand | 3217073 | 3218593 |
| JW3044(ygjG) | | 3219101 | 3220390 |
| JW3045(ygjH) | Complementary strand | 3220432 | 3220764 |
| JW3046(ebgR) | | 3220983 | 3221966 |
| JW3047(ebgA) | | 3222150 | 3225242 |
| JW3048(ebgC) | | 3225239 | 3225688 |
| JW3049(ygjI) | | 3225751 | 3227184 |
| JW3050(ygjJ) | | 3227318 | 3228388 |
| JW3051(ygjK) | | 3228405 | 3230756 |
| JW3052(fadH) | | 3231182 | 3233200 |
| JW3053(ygiM) | Complementary strand | 3233245 | 3233661 |
| JW3054(ygjN) | Complementary strand | 3233658 | 3233972 |
| JW3055(ygjO) | Complementary strand | 3234256 | 3235422 |
| JW3056(ygjP) | | 3235441 | 3235980 |
| JW3057(ygjQ) | | 3236057 | 3236749 |
| JW3058(ygjR) | | 3236810 | 3237814 |
| JW3059(ygjT) | | 3238098 | 3239063 |
| JW3060(ygjU) | | 3239460 | 3240704 |
| JW3061(ygjV) | Complementary strand | 3240709 | 3241260 |
| JW3062(uxaA) | Complementary strand | 3241343 | 3242830 |
| JW3063(uxaC) | Complementary strand | 3242845 | 3244257 |
| JW3064(exuT) | | 3244620 | 3246038 |
| JW3065(exuR) | | 3246168 | 3246944 |
| JW3066(yqjA) | | 3247289 | 3247951 |
| JW3067(yqjB) | | 3247955 | 3248338 |
| JW3068(yqjC) | | 3248470 | 3248853 |
| JW3069(yqjD) | | 3248891 | 3249196 |
| JW3070(yqjE) | | 3249199 | 3249603 |
| JW3071(yqjK) | | 3249593 | 3249892 |
| JW3072(yqjF) | | 3249988 | 3250470 |
| JW3073(yqjG) | | 3250540 | 3251526 |
| JW3074(yhaH) | | 3251820 | 3252185 |
| JW3075(yhaI) | | 3252427 | 3252783 |
| JW3076(yhaJ) | Complementary strand | 3252834 | 3253730 |
| JW3077(yhaK) | | 3253835 | 3254536 |
| JW3078(yhaL) | | 3254553 | 3254723 |
| JW3079(yhaM) | Complementary strand | 3254857 | 3255423 |
| JW3080(yhaN) | Complementary strand | 3255605 | 3256168 |
| JW3081(yhaO) | Complementary strand | 3256196 | 3257473 |
| JW3082(yhaP) | Complementary strand | 3257804 | 3258631 |
| JW3083(yhaQ) | Complementary strand | 3258751 | 3259173 |
| JW3084(yhaR) | Complementary strand | 3259239 | 3259691 |
| JW3085(tdcE) | Complementary strand | 3259695 | 3261935 |
| JW3086(tdcD) | Complementary strand | 3261969 | 3263177 |
| JW3087(tdcC) | Complementary strand | 3263203 | 3264534 |
| JW3088(tdcB) | Complementary strand | 3264556 | 3265545 |
| JW3089(tdcA) | Complementary strand | 3265644 | 3266582 |
| JW3090(tdcR) | | 3266816 | 3267115 |
| JW3091(yhaB) | | 3267371 | 3267910 |
| JW3092(yhaC) | | 3267932 | 3269119 |
| JW3093(yhaD) | Complementary strand | 3270142 | 3271368 |
| JW3094(yhaE) | Complementary strand | 3271384 | 3272283 |
| JW3095(yhaF) | Complementary strand | 3272304 | 3273074 |
| JW3096(yhaU) | Complementary strand | 3273090 | 3274424 |
| JW3097(yhaG) | | 3274799 | 3276310 |
| JW3098(sohA) | | 3276519 | 3276854 |
| JW3099(yhaV) | | 3276854 | 3277318 |
| JW3100(agaR) | Complementary strand | 3277373 | 3278182 |
| JW3101(agaZ) | | 3278431 | 3279711 |
| JW3102(agaV) | | 3279734 | 3280207 |
| JW3103(agaW) | | 3280218 | 3280619 |
| JW3104(agaA) | | 3280639 | 3281142 |
| JW3105(agaS) | | 3281493 | 3282647 |
| JW3106(agaY) | | 3282660 | 3283520 |
| JW3107(agaB) | | 3283687 | 3284163 |
| JW3108(agaC) | | 3284202 | 3285005 |
| JW3109(agaD) | | 3284995 | 3285786 |
| JW3110(agaI) | | 3285787 | 3286542 |
| JW3111(yraH) | | 3286943 | 3287527 |
| JW3112(yraI) | | 3287607 | 3288302 |
| JW3113(yraJ) | | 3288331 | 3290847 |
| JW3114(yraK) | | 3290858 | 3291949 |
| JW3115(yraL) | Complementary strand | 3291992 | 3292852 |
| JW3116(yraM) | | 3292917 | 3294953 |
| JW3117(yraN) | | 3294911 | 3295306 |
| JW3118(yraO) | | 3295326 | 3295916 |
| JW3119(yraP) | | 3295926 | 3296501 |
| JW3120(yraQ) | Complementary strand | 3296615 | 3297655 |
| JW3121(yraR) | Complementary strand | 3297728 | 3298408 |
| JW3122(yhbO) | | 3298449 | 3299009 |
| JW3123(yhbP) | Complementary strand | 3298989 | 3299432 |
| JW3124(yhbQ) | | 3299483 | 3299785 |
| JW3125(yhbS) | Complementary strand | 3299772 | 3300275 |
| JW3126(yhbT) | Complementary strand | 3300269 | 3300793 |
| JW3127(yhbU) | | 3301002 | 3301997 |
| JW3128(yhbV) | | 3301988 | 3302884 |
| JW3129(yhbW) | | 3302965 | 3303972 |
| JW3130(mtr) | Complementary strand | 3304090 | 3305334 |
| JW3131(deaD) | Complementary strand | 3305488 | 3307428 |
| JW3132(nlpI) | Complementary strand | 3307557 | 3308441 |
| JW3133(pnp) | Complementary strand | 3308550 | 3310685 |
| JW3134(rpsO) | Complementary strand | 3310932 | 3311201 |
| JW3135(truB) | Complementary strand | 3311350 | 3312294 |
| JW3136(rbfA) | Complementary strand | 3312294 | 3312695 |
| JW3137(infB) | Complementary strand | 3312859 | 3315531 |
| JW3138(nusA) | Complementary strand | 3315556 | 3317043 |
| JW3139(yhbC) | Complementary strand | 3317071 | 3317493 |
| JW3140(argG) | | 3318154 | 3319497 |
| JW3141(yhbX) | Complementary strand | 3319505 | 3321148 |
| JW3142(secG) | Complementary strand | 3321690 | 3322022 |
| JW3143(mrsA) | Complementary strand | 3322250 | 3323587 |
| JW3144(folP) | Complementary strand | 3323580 | 3324428 |
| JW3145(ftsH) | Complementary strand | 3324518 | 3326452 |
| JW3146(ftsJ) | Complementary strand | 3326552 | 3327181 |
| JW3147(yhbY) | | 3327307 | 3327600 |
| JW3148(greA) | Complementary strand | 3327756 | 3328232 |
| JW3149(dacB) | | 3328480 | 3329913 |
| JW3150(yhbZ) | Complementary strand | 3330099 | 3331271 |
| JW3151(yhbE) | Complementary strand | 3331287 | 3332252 |
| JW3152(rpmA) | Complementary strand | 3332379 | 3332636 |
| JW3153(rplU) | Complementary strand | 3332657 | 3332968 |
| JW3154(ispB) | | 3333227 | 3334198 |
| JW3155(nlp) | | 3334426 | 3334704 |
| JW3156(murA) | Complementary strand | 3334752 | 3336011 |
| JW3157(yrbA) | Complementary strand | 3336066 | 3336320 |
| JW3158(yrbB) | Complementary strand | 3336480 | 3336869 |
| JW3159(yrbC) | Complementary strand | 3336773 | 3337408 |
| JW3160(yrbD) | Complementary strand | 3337427 | 3337978 |
| JW3161(yrbE) | Complementary strand | 3337983 | 3338765 |
| JW3162(yrbF) | Complementary strand | 3338773 | 3339582 |
| JW3163(yrbG) | | 3339792 | 3340769 |
| JW3164(yrbH) | | 3340783 | 3341769 |
| JW3165(yrbI) | | 3341790 | 3342356 |
| JW3166(yrbK) | | 3342353 | 3342928 |
| JW3167(yhbN) | | 3342897 | 3343454 |
| JW3168(yhbG) | | 3343461 | 3344186 |
| JW3169(rpoN) | | 3344234 | 3345667 |
| JW3170(yhbH) | | 3345690 | 3345977 |
| JW3171(ptsN) | | 3346095 | 3346586 |
| JW3172(yhbJ) | | 3346632 | 3347486 |
| JW3173(ptsO) | | 3347483 | 3347755 |
| JW3174(yrbL) | | 3347969 | 3348601 |
| JW3175(mtgA) | Complementary strand | 3348598 | 3349326 |
| JW3176(yhbL) | Complementary strand | 3349323 | 3349976 |
| JW3177(arcB) | Complementary strand | 3350206 | 3352536 |
| JW3178(yhcC) | Complementary strand | 3352632 | 3353561 |
| JW3179(gltB) | | 3354143 | 3358696 |
| JW3180(gltD) | | 3358709 | 3360127 |
| JW3181(gltF) | | 3360687 | 3361451 |
| JW3182(yhcA) | | 3361623 | 3362297 |
| JW3183(yhcD) | | 3362318 | 3364699 |
| JW3184(yhcE) | | 3364696 | 3365175 |
| JW3185(is5B) | Complementary strand | 3365213 | 3366229 |
| JW3186(yi51) | | 3365549 | 3365917 |
| JW3187(yhcE) | | 3366192 | 3366440 |
| JW3188(yhcF) | | 3366437 | 3367153 |
| JW3189(yhcG) | | 3367338 | 3368465 |
| JW3190(yhcH) | Complementary strand | 3368525 | 3368989 |
| JW3191(nanK) | Complementary strand | 3368986 | 3369894 |
| JW3192(nanE) | Complementary strand | 3369858 | 3370547 |
| JW3193(nanT) | Complementary strand | 3370595 | 3372085 |
| JW3194(npl) | Complementary strand | 3372194 | 3373087 |
| JW3195(nanR) | Complementary strand | 3373209 | 3374000 |
| JW3196(dcuD) | | 3374380 | 3375747 |
| JW3197(sspB) | Complementary strand | 3375790 | 3376287 |
| JW3198(sspA) | Complementary strand | 3376293 | 3376931 |
| JW3199(rpsI) | Complementary strand | 3377326 | 3377718 |
| JW3200(rplM) | Complementary strand | 3377734 | 3378162 |
| JW3201(yhcM) | Complementary strand | 3378381 | 3379508 |
| JW3202(yhcB) | | 3379696 | 3380100 |
| JW3203(hhoA) | | 3380254 | 3381621 |
| JW3204(hhoB) | | 3381711 | 3382778 |
| JW3205(mdh) | Complementary strand | 3382841 | 3383779 |
| JW3206(argR) | | 3384214 | 3384684 |
| JW3207(yhcN) | | 3384998 | 3385312 |
| JW3208(yhcO) | Complementary strand | 3385368 | 3385640 |
| JW3209(yhcP) | Complementary strand | 3385732 | 3387699 |
| JW3210(yhcQ) | Complementary strand | 3387705 | 3388637 |
| JW3211(yhcR) | Complementary strand | 3388645 | 3388917 |
| JW3212(yhcS) | | 3389031 | 3389960 |
| JW3213(tldD) | Complementary strand | 3390094 | 3391539 |
| JW3214(yhdP) | Complementary strand | 3391970 | 3394930 |
| JW3215(yhdR) | Complementary strand | 3394923 | 3395771 |
| JW3216(rng) | Complementary strand | 3395839 | 3397308 |
| JW3217(yhdE) | Complementary strand | 3397298 | 3397891 |
| JW3218(mreD) | Complementary strand | 3397900 | 3398388 |
| JW3219(mreC) | Complementary strand | 3398388 | 3399491 |
| JW3220(mreB) | Complementary strand | 3399557 | 3400600 |
| JW3221(yhdA) | Complementary strand | 3400905 | 3402845 |
| JW3222(yhdH) | | 3402997 | 3403971 |
| JW3222.5(529#3) | | 3404788 | 3404976 |
| JW3223(accB) | | 3404949 | 3405419 |
| JW3224(accC) | | 3405430 | 3406779 |
| JW3225(yhdT) | | 3406888 | 3407130 |
| JW3226(panF) | | 3407120 | 3408571 |
| JW3227(prmA) | | 3408583 | 3409464 |
| JW3228(yhdG) | | 3409793 | 3410758 |
| JW3229(fis) | | 3410784 | 3411080 |
| JW3230(yhdJ) | | 3411160 | 3412050 |
| JW3231(yhdU) | | 3412134 | 3412313 |
| JW3232(envR) | Complementary strand | 3412316 | 3412978 |
| JW3233(acrE) | | 3413377 | 3414534 |
| JW3234(envD) | | 3414546 | 3417650 |
| JW3235(yhdV) | | 3417903 | 3418124 |
| JW3236(yhdW) | | 3418662 | 3419579 |
| JW3237(yhdX) | | 3419629 | 3420735 |
| JW3238(yhdY) | | 3420834 | 3421940 |
| JW3239(yhdZ) | | 3421948 | 3422706 |
| JW3240(yrdA) | | 3428533 | 3429303 |
| JW3241(yrdB) | Complementary strand | 3429279 | 3429536 |
| JW3242(aroE) | Complementary strand | 3429533 | 3430351 |
| JW3243(yrdC) | Complementary strand | 3430356 | 3430928 |
| JW3244(yrdD) | Complementary strand | 3430933 | 3431442 |
| JW3245(smg) | Complementary strand | 3431505 | 3431978 |
| JW3246(smf) | Complementary strand | 3431950 | 3432327 |
| JW3247(smf) | Complementary strand | 3432312 | 3433073 |
| JW3248(def) | | 3433203 | 3433712 |
| JW3249(fmt) | | 3433727 | 3434674 |
| JW3250(sun) | | 3434720 | 3436009 |
| JW3251(trkA) | | 3436031 | 3437407 |
| JW3252(mscL) | | 3437537 | 3437947 |
| JW3253(yhdL) | Complementary strand | 3437944 | 3438162 |
| JW3254(zntR) | Complementary strand | 3438218 | 3438643 |
| JW3255(yhdN) | Complementary strand | 3438654 | 3439022 |
| JW3256(rplQ) | Complementary strand | 3439129 | 3439512 |
| JW3257(rpoA) | Complementary strand | 3439553 | 3440542 |
| JW3258(rpsD) | Complementary strand | 3440568 | 3441188 |
| JW3259(rpsK) | Complementary strand | 3441222 | 3441611 |
| JW3260(rpsM) | Complementary strand | 3441628 | 3441984 |
| JW3261(rpmJ) | Complementary strand | 3442131 | 3442247 |
| JW3262(secY) | Complementary strand | 3442279 | 3443610 |
| JW3263(rplO) | Complementary strand | 3443618 | 3444052 |
| JW3264(rpmD) | Complementary strand | 3444056 | 3444235 |
| JW3265(rpsE) | Complementary strand | 3444239 | 3444742 |
| JW3266(rplR) | Complementary strand | 3444757 | 3445110 |
| JW3267(rplF) | Complementary strand | 3445120 | 3445653 |
| JW3268(rpsH) | Complementary strand | 3445666 | 3446058 |
| JW3269(rpsN) | Complementary strand | 3446092 | 3446397 |
| JW3270(rplE) | Complementary strand | 3446412 | 3446951 |
| JW3271(rplX) | Complementary strand | 3446966 | 3447280 |
| JW3272(rplN) | Complementary strand | 3447291 | 3447662 |
| JW3273(rpsQ) | Complementary strand | 3447827 | 3448081 |
| JW3274(rpmC) | Complementary strand | 3448081 | 3448272 |
| JW3275(rplP) | Complementary strand | 3448272 | 3448682 |
| JW3276(rpsC) | Complementary strand | 3448695 | 3449396 |
| JW3277(rplV) | Complementary strand | 3449414 | 3449746 |
| JW3278(rpsS) | Complementary strand | 3449761 | 3450039 |
| JW3279(rplB) | Complementary strand | 3450056 | 3450877 |
| JW3280(rplW) | Complementary strand | 3450895 | 3451197 |
| JW3281(rplD) | Complementary strand | 3451194 | 3451799 |
| JW3282(rplC) | Complementary strand | 3451810 | 3452439 |
| JW3283(rpsJ) | Complementary strand | 3452472 | 3452783 |
| JW3284(pinO) | Complementary strand | 3453021 | 3453440 |
| JW3285(gspA) | Complementary strand | 3453442 | 3454911 |
| JW3286(gspC) | | 3455091 | 3455906 |
| JW3287(gspD) | | 3455878 | 3457842 |
| JW3288(gspE) | | 3457852 | 3459333 |
| JW3289(hofF) | | 3459330 | 3460526 |
| JW3290(hofG) | | 3460536 | 3460973 |
| JW3291(hofH) | | 3460981 | 3461490 |
| JW3292(gspI) | | 3461448 | 3461864 |
| JW3293(gspJ) | | 3461857 | 3462444 |
| JW3294(gspK) | | 3462437 | 3463420 |
| JW3295(gspL) | | 3463432 | 3464598 |
| JW3296(pshM) | | 3464571 | 3465056 |
| JW3297(hofD) | | 3465056 | 3465733 |
| JW3298(bfr) | Complementary strand | 3465762 | 3466238 |
| JW3299(yheA) | Complementary strand | 3466310 | 3466504 |
| JW3300(chiA) | Complementary strand | 3466673 | 3469366 |
| JW3301(tufA) | Complementary strand | 3469658 | 3470842 |
| JW3302(fusA) | Complementary strand | 3470913 | 3473027 |
| JW3303(rpsG) | Complementary strand | 3473055 | 3473594 |
| JW3304(rpsL) | Complementary strand | 3473691 | 3474065 |
| JW3305(yheL) | Complementary strand | 3474191 | 3474478 |
| JW3306(yheM) | Complementary strand | 3474486 | 3474845 |
| JW3307(yheN) | Complementary strand | 3474845 | 3475231 |
| JW3308(yheO) | Complementary strand | 3475231 | 3475965 |
| JW3309(fkpA) | Complementary strand | 3476120 | 3476932 |
| JW3310(slyX) | | 3477153 | 3477371 |
| JW3311(slyD) | Complementary strand | 3477420 | 3478010 |
| JW3312(625#3) | Complementary strand | 3478105 | 3478305 |
| JW3313(kefB) | Complementary strand | 3478315 | 3480120 |
| JW3314(yheR) | Complementary strand | 3480120 | 3480674 |
| JW3315(yheS) | | 3480802 | 3482715 |
| JW3316(yheT) | | 3482715 | 3483737 |
| JW3317(yheU) | | 3483731 | 3483949 |
| JW3318(prkB) | | 3484003 | 3484872 |
| JW3319(yhfA) | Complementary strand | 3484927 | 3485331 |
| JW3320(crp) | | 3485633 | 3486265 |
| JW3321(yhfK) | | 3486316 | 3488406 |
| JW3322(argD) | Complementary strand | 3488473 | 3489693 |
| JW3323(pabA) | Complementary strand | 3489779 | 3490342 |
| JW3324(fic) | Complementary strand | 3490374 | 3490976 |
| JW3325(yhfG) | Complementary strand | 3490966 | 3491133 |
| JW3326(ppiA) | Complementary strand | 3491238 | 3491810 |
| JW3327(yhfC) | | 3492081 | 3493262 |
| JW3328(nirB) | | 3493524 | 3496067 |
| JW3329(nirD) | | 3496064 | 3496390 |
| JW3330(nirC) | | 3496516 | 3497322 |
| JW3331(cysG) | | 3497341 | 3498714 |
| JW3332(yhfL) | | 3498961 | 3499128 |
| JW3333(yhfM) | | 3499423 | 3500760 |
| JW3334(yhfN) | | 3500760 | 3501803 |
| JW3335(yhfO) | | 3501766 | 3502215 |
| JW3336(yhfP) | | 3502280 | 3502684 |
| JW3337(yhfQ) | | 3502681 | 3503466 |
| JW3338(yhfR) | | 3503500 | 3504297 |
| JW3339(yhfS) | Complementary strand | 3504449 | 3505534 |
| JW3340(yhfT) | Complementary strand | 3505546 | 3506850 |
| JW3341(yhfU) | Complementary strand | 3506862 | 3507254 |
| JW3342(php) | Complementary strand | 3507226 | 3508104 |
| JW3343(yhfW) | Complementary strand | 3508101 | 3509327 |
| JW3344(yhfX) | Complementary strand | 3509327 | 3510490 |
| JW3345(yhfY) | Complementary strand | 3510574 | 3510978 |
| JW3346(yhfZ) | Complementary strand | 3510953 | 3511639 |
| JW3347(trpS) | Complementary strand | 3512148 | 3513152 |
| JW3348(gph) | Complementary strand | 3513145 | 3513903 |
| JW3349(rpe) | Complementary strand | 3513896 | 3514573 |
| JW3350(dam) | Complementary strand | 3514591 | 3515427 |
| JW3351(damX) | Complementary strand | 3515534 | 3516820 |
| JW3352(aroB) | Complementary strand | 3516912 | 3518000 |
| JW3353(aroK) | Complementary strand | 3518057 | 3518578 |
| JW3354(hofQ) | Complementary strand | 3518979 | 3520217 |
| JW3355(yrfA) | Complementary strand | 3520129 | 3520572 |
| JW3356(yrfB) | Complementary strand | 3520523 | 3520963 |
| JW3357(yrfC) | Complementary strand | 3520947 | 3521486 |
| JW3358(yrfD) | Complementary strand | 3521486 | 3522292 |
| JW3359(mrcA) | | 3522385 | 3524937 |
| JW3360(yrfE) | Complementary strand | 3525103 | 3525663 |
| JW3361(yrfF) | | 3525983 | 3528118 |
| JW3362(yrfG) | | 3528138 | 3528851 |
| JW3363(yrfH) | | 3528862 | 3529263 |
| JW3364(yrfI) | | 3529282 | 3530166 |
| JW3365(yhgE) | Complementary strand | 3530229 | 3531953 |
| JW3366(pckA) | | 3532332 | 3533954 |
| JW3367(envZ) | Complementary strand | 3534030 | 3535382 |
| JW3368(ompR) | Complementary strand | 3535379 | 3536098 |
| JW3369(greB) | | 3536326 | 3536802 |
| JW3370(yhgF) | | 3536899 | 3539220 |
| JW3371(feoA) | | 3539675 | 3539902 |
| JW3372(feoB) | | 3539919 | 3542240 |
| JW3373(yhgG) | | 3542240 | 3542476 |
| JW3374(yhgA) | | 3542679 | 3543557 |
| JW3375(bioH) | Complementary strand | 3543586 | 3544356 |
| JW3376(yhgH) | | 3544346 | 3545077 |
| JW3377(yhgI) | | 3545136 | 3545711 |
| JW3378(gntT) | | 3546071 | 3547384 |
| JW3379(malQ) | Complementary strand | 3547495 | 3549579 |
| JW3380(malP) | Complementary strand | 3549589 | 3551982 |
| JW3381(malT) | | 3552594 | 3555299 |
| JW3382(rtcA) | Complementary strand | 3555342 | 3555947 |
| JW3383(rtcA) | Complementary strand | 3555920 | 3556360 |
| JW3384(rtcB) | Complementary strand | 3556361 | 3557587 |
| JW3385(rtcR) | | 3557776 | 3559374 |
| JW3386(glpR) | Complementary strand | 3559356 | 3560114 |
| JW3387(glpG) | Complementary strand | 3560131 | 3560961 |
| JW3388(glpE) | Complementary strand | 3561006 | 3561332 |
| JW3389(glpD) | | 3561522 | 3563027 |
| JW3390(yzgL) | Complementary strand | 3563233 | 3563514 |
| JW3391(glgP) | Complementary strand | 3563643 | 3566090 |
| JW3392(glgA) | Complementary strand | 3566109 | 3567542 |
| JW3393(glgC) | Complementary strand | 3567542 | 3568837 |
| JW3394(glgX) | Complementary strand | 3568855 | 3570828 |
| JW3395(glgB) | Complementary strand | 3570825 | 3573011 |
| JW3396(asd) | Complementary strand | 3573284 | 3574387 |
| JW3397(yhgN) | | 3574580 | 3575173 |
| JW3398(gntU) | Complementary strand | 3575230 | 3575565 |
| JW3399(gntU) | Complementary strand | 3575571 | 3576569 |
| JW3400(gntK) | Complementary strand | 3576573 | 3577100 |
| JW3401(gntR) | Complementary strand | 3577292 | 3578233 |
| JW3402(yhhW) | Complementary strand | 3578457 | 3579152 |
| JW3403(yhhX) | Complementary strand | 3579275 | 3580312 |
| JW3404(615#7.1) | | 3580259 | 3580411 |
| JW3405(yhhY) | | 3580645 | 3581133 |
| JW3406(yhhZ) | | 3581370 | 3582548 |
| JW3407(yrhA) | | 3582545 | 3582961 |
| JW3408(insA) | | 3582990 | 3583265 |
| JW3409(insB) | | 3583184 | 3583687 |
| JW3410(615#10.1) | | 3583950 | 3584066 |
| JW3411(yrhB) | | 3584266 | 3584550 |
| JW3412(ggt) | Complementary strand | 3584588 | 3586330 |
| JW3413(yhhA) | | 3586450 | 3586890 |
| JW3414(ugpQ) | Complementary strand | 3586877 | 3587620 |
| JW3415(ugpC) | Complementary strand | 3587617 | 3588687 |
| JW3416(ugpE) | Complementary strand | 3588689 | 3589534 |
| JW3417(ugpA) | Complementary strand | 3589531 | 3590418 |
| JW3418(ugpB) | Complementary strand | 3590516 | 3591832 |
| JW3418.5(613#2) | Complementary strand | 3592067 | 3592219 |
| JW3419(livF) | Complementary strand | 3592231 | 3592944 |
| JW3420(livG) | Complementary strand | 3592946 | 3593713 |
| JW3421(livM) | Complementary strand | 3593710 | 3594987 |
| JW3422(livH) | Complementary strand | 3594984 | 3595910 |
| JW3423(livK) | Complementary strand | 3595958 | 3597067 |
| JW3424(yhhK) | | 3597491 | 3597874 |
| JW3425(livJ) | Complementary strand | 3598062 | 3599165 |
| JW3426(rpoH) | Complementary strand | 3599436 | 3600290 |
| JW3427(ftsX) | Complementary strand | 3600535 | 3601593 |
| JW3428(ftsE) | Complementary strand | 3601586 | 3602254 |
| JW3429(ftsY) | Complementary strand | 3602257 | 3603750 |
| JW3430(yhhF) | | 3603900 | 3604496 |
| JW3431(yhhL) | | 3604363 | 3604755 |
| JW3432(yhhM) | Complementary strand | 3604758 | 3605117 |
| JW3433(yhhN) | | 3605258 | 3605884 |
| JW3434(atzN) | | 3605958 | 3608156 |
| JW3435(yhhP) | Complementary strand | 3608258 | 3608503 |
| JW3436(yhhQ) | | 3608724 | 3609389 |
| JW3437(yhhR) | | 3609408 | 3610019 |
| JW3438(yhhS) | Complementary strand | 3610023 | 3611282 |
| JW3439(yhhT) | | 3611291 | 3612421 |
| JW3440(yhhU) | | 3612476 | 3613063 |
| JW3441(nikA) | | 3613174 | 3614748 |
| JW3442(nikB) | | 3614748 | 3615692 |
| JW3443(nikC) | | 3615689 | 3616522 |
| JW3444(nikD) | | 3616522 | 3617286 |
| JW3445(nikE) | | 3617283 | 3618089 |
| JW3446(yhhG) | | 3618095 | 3618496 |
| JW3447(rhsB) | | 3618699 | 3622934 |
| JW3448(610#6.1) | Complementary strand | 3621225 | 3621365 |
| JW3449(yhhH) | | 3622906 | 3623289 |
| JW3450(yibA) | | 3623379 | 3623639 |
| JW3451(yhhI) | | 3623885 | 3625021 |
| JW3452(yhhJ) | Complementary strand | 3625186 | 3626313 |
| JW3453(yhiH) | Complementary strand | 3626310 | 3628994 |
| JW3454(yhiI) | Complementary strand | 3629041 | 3630108 |
| JW3455(yhiJ) | Complementary strand | 3630474 | 3632096 |
| JW3456(yhiK) | Complementary strand | 3632358 | 3632729 |
| JW3457(yhiL) | Complementary strand | 3632726 | 3633964 |
| JW3458(yhiM) | | 3634248 | 3635399 |
| JW3459(yhiN) | Complementary strand | 3635714 | 3636916 |
| JW3460(pitA) | | 3637148 | 3638647 |
| JW3461(uspB) | Complementary strand | 3638891 | 3639226 |
| JW3462(uspA) | | 3639617 | 3640051 |
| JW3463(yhiP) | | 3640368 | 3641837 |
| JW3464(yhiQ) | Complementary strand | 3641886 | 3642743 |
| JW3465(prlC) | Complementary strand | 3642646 | 3644688 |
| JW3466(yhiR) | | 3644891 | 3645733 |
| JW3467(gor) | | 3645805 | 3647157 |
| JW3468(arsR) | | 3648034 | 3648387 |
| JW3469(arsB) | | 3648441 | 3649730 |
| JW3470(arsC) | | 3649743 | 3650168 |
| JW3471(yhiS) | | 3650797 | 3651579 |
| JW3472(is5B) | Complementary strand | 3651688 | 3652704 |
| JW3473(yi51) | | 3652024 | 3652392 |
| JW3474(slp) | | 3653467 | 3654033 |
| JW3475(yhiF) | | 3654189 | 3654719 |
| JW3476(yhiD) | Complementary strand | 3654761 | 3655408 |
| JW3477(hdeB) | Complementary strand | 3655472 | 3655810 |
| JW3478(hdeA) | Complementary strand | 3655914 | 3656246 |
| JW3479(hdeD) | | 3656501 | 3657073 |
| JW3480(yhiE) | | 3657872 | 3658399 |
| JW3481(yhiU) | | 3658738 | 3659895 |
| JW3482(yhiV) | | 3659920 | 3663033 |
| JW3483(yhiW) | Complementary strand | 3663396 | 3664124 |
| JW3484(yhiX) | Complementary strand | 3664492 | 3665316 |
| JW3485(gadA) | Complementary strand | 3665686 | 3667086 |
| JW3486(yhjA) | Complementary strand | 3667297 | 3668694 |
| JW3487(treF) | | 3669098 | 3670747 |
| JW3488(yhjB) | Complementary strand | 3670798 | 3671400 |
| JW3489(yhjC) | | 3671848 | 3672819 |
| JW3490(yhjD) | | 3672868 | 3673881 |
| JW3491(yhjE) | | 3674292 | 3675614 |
| JW3492(yhjG) | Complementary strand | 3675796 | 3677871 |
| JW3493(yhjH) | Complementary strand | 3677926 | 3678693 |
| JW3494(kdgK) | | 3678706 | 3679854 |
| JW3495(yhjJ) | Complementary strand | 3679950 | 3681446 |
| JW3496(dctA) | Complementary strand | 3681667 | 3682953 |
| JW3497(yhjK) | Complementary strand | 3683136 | 3685091 |
| JW3498(yhjL) | Complementary strand | 3685206 | 3688628 |
| JW3499(yhjM) | Complementary strand | 3688660 | 3689766 |
| JW3500(yhjN) | Complementary strand | 3689773 | 3692112 |
| JW3501(yhjO) | Complementary strand | 3692123 | 3694789 |
| JW3502(yhjQ) | Complementary strand | 3694738 | 3695466 |
| JW3503(yhjR) | Complementary strand | 3695502 | 3695690 |
| JW3504(yhjS) | | 3695963 | 3697534 |
| JW3505(yhjT) | | 3697534 | 3697722 |
| JW3506(yhjU) | | 3697719 | 3699398 |
| JW3507(603#8) | Complementary strand | 3699485 | 3699760 |
| JW3508(yhjV) | | 3700068 | 3701339 |
| JW3509(dppF) | Complementary strand | 3701369 | 3702373 |
| JW3510(dppD) | Complementary strand | 3702370 | 3703353 |
| JW3511(dppC) | Complementary strand | 3703364 | 3704266 |
| JW3512(dppB) | Complementary strand | 3704276 | 3705295 |
| JW3513(dppA) | Complementary strand | 3705603 | 3707210 |
| JW3514(yzpK) | Complementary strand | 3707725 | 3708072 |
| JW3515(yhjW) | Complementary strand | 3708289 | 3710013 |
| JW3516(yhjX) | Complementary strand | 3710304 | 3711512 |
| JW3517(yhjY) | Complementary strand | 3711741 | 3712445 |
| JW3518(tag) | | 3712597 | 3713160 |
| JW3519(yiaC) | | 3713157 | 3713597 |
| JW3520(bisC) | Complementary strand | 3713566 | 3715905 |
| JW3521(yiaD) | | 3716052 | 3716711 |
| JW3522(yiaE) | | 3716803 | 3717789 |
| JW3523(yiaF) | Complementary strand | 3717839 | 3718669 |
| JW3524(yiaG) | | 3718983 | 3719273 |
| JW3525(cspA) | | 3719554 | 3719766 |
| JW3526(yiaZ) | Complementary strand | 3719953 | 3720105 |
| JW3527(yi5A) | | 3720185 | 3720706 |
| JW3528(yi5B) | | 3720703 | 3721554 |
| JW3529(yi5C) | Complementary strand | 3720961 | 3721317 |
| JW3530(glyS) | Complementary strand | 3721833 | 3723902 |
| JW3531(glyQ) | Complementary strand | 3723912 | 3724823 |
| JW3532(601#3) | Complementary strand | 3724918 | 3725217 |
| JW3533(yiaH) | | 3725392 | 3726387 |
| JW3534(yiaA) | Complementary strand | 3726429 | 3726866 |
| JW3535(yiaB) | Complementary strand | 3726912 | 3727265 |
| JW3536(xylB) | Complementary strand | 3727422 | 3728876 |
| JW3537(xylA) | Complementary strand | 3728948 | 3730270 |
| JW3538(xylF) | | 3730636 | 3731628 |
| JW3539(xylG) | | 3731706 | 3733247 |
| JW3540(xylH) | | 3733225 | 3734406 |
| JW3541(xylR) | | 3734484 | 3735662 |
| JW3542(bax) | Complementary strand | 3735858 | 3736682 |
| JW3543(malS) | | 3737002 | 3739032 |
| JW3544(avtA) | | 3739210 | 3740463 |
| JW3545(ysaA) | Complementary strand | 3740614 | 3741087 |
| JW3546(yiaJ) | Complementary strand | 3741189 | 3742037 |
| JW3547(yiaK) | | 3742238 | 3743236 |
| JW3548(yiaL) | | 3743248 | 3743715 |
| JW3549(yiaM) | | 3743833 | 3744306 |
| JW3550(yiaN) | | 3744309 | 3745583 |
| JW3551(yiaO) | | 3745600 | 3746586 |
| JW3552(lyx) | | 3746590 | 3748086 |
| JW3553(sgbH) | | 3748083 | 3748745 |
| JW3554(sgbU) | | 3748705 | 3749598 |
| JW3555(sgbE) | | 3749592 | 3750287 |
| JW3556(yiaT) | Complementary strand | 3750634 | 3751374 |
| JW3557(yiaU) | | 3751498 | 3752472 |
| JW3558(yiaV) | Complementary strand | 3752469 | 3753605 |
| JW3559(yiaW) | Complementary strand | 3753611 | 3753934 |
| JW3560(577#1.1) | | 3754048 | 3754260 |
| JW3561(aldB) | Complementary strand | 3754479 | 3756017 |
| JW3562(yiaY) | Complementary strand | 3756182 | 3757330 |
| JW3563(selB) | Complementary strand | 3757520 | 3759364 |
| JW3564(selA) | Complementary strand | 3759361 | 3760752 |
| JW3565(yibF) | Complementary strand | 3760850 | 3761458 |
| JW3566(rhsA) | | 3761686 | 3765819 |
| JW3567(576#2.1) | Complementary strand | 3764212 | 3764631 |
| JW3568(yibA) | | 3765840 | 3766682 |
| JW3569(yibJ) | | 3766724 | 3767425 |
| JW3570(yibG) | | 3767680 | 3768141 |
| JW3570.5(576#7) | | 3769491 | 3769649 |
| JW3571(yibH) | Complementary strand | 3769746 | 3770882 |
| JW3572(yibI) | Complementary strand | 3770885 | 3771247 |
| JW3573(mtlA) | | 3771784 | 3773697 |
| JW3574(mtlD) | | 3773927 | 3775075 |
| JW3575(mtlR) | | 3775075 | 3775662 |
| JW3576(576#14) | Complementary strand | 3775674 | 3775883 |
| JW3577(yibL) | | 3776168 | 3776530 |
| JW3578(lldP) | | 3776902 | 3778557 |
| JW3579(lldR) | | 3778557 | 3779333 |
| JW3580(lldD) | | 3779330 | 3780520 |
| JW3581(yibK) | | 3780718 | 3781191 |
| JW3582(cysE) | Complementary strand | 3781244 | 3782065 |
| JW3583(gpsA) | Complementary strand | 3782145 | 3783164 |
| JW3584(secB) | Complementary strand | 3783164 | 3783631 |
| JW3585(grxC) | Complementary strand | 3783694 | 3783945 |
| JW3586(yibN) | Complementary strand | 3784087 | 3784518 |
| JW3587(yibO) | | 3784763 | 3786307 |
| JW3588(yibP) | | 3786317 | 3787600 |
| JW3589(yibQ) | | 3787730 | 3788563 |
| JW3590(yibD) | Complementary strand | 3788550 | 3789584 |
| JW3591(tdh) | Complementary strand | 3789823 | 3790848 |
| JW3592(kbl) | Complementary strand | 3790858 | 3792054 |
| JW3593(htrL) | Complementary strand | 3792329 | 3793201 |
| JW3594(rfaD) | | 3793490 | 3794422 |
| JW3595(rfaF) | | 3794432 | 3795478 |
| JW3596(rfaC) | | 3795482 | 3796441 |
| JW3597(rfaL) | | 3796451 | 3797710 |
| JW3598(rfaK) | Complementary strand | 3797742 | 3798815 |
| JW3599(rfaZ) | Complementary strand | 3798848 | 3799699 |
| JW3600(rfaY) | Complementary strand | 3799770 | 3800468 |
| JW3601(rfaJ) | Complementary strand | 3800486 | 3801502 |
| JW3602(rfaI) | Complementary strand | 3801542 | 3802561 |
| JW3603(rfaB) | Complementary strand | 3802561 | 3803670 |
| JW3604(rfaS) | Complementary strand | 3803684 | 3804619 |
| JW3605(rfaP) | Complementary strand | 3804656 | 3805453 |
| JW3606(rfaG) | Complementary strand | 3805446 | 3806570 |
| JW3607(rfaQ) | Complementary strand | 3806567 | 3807601 |
| JW3608(kdtA) | | 3808043 | 3809320 |
| JW3609(kdtB) | | 3809328 | 3809807 |
| JW3610(mutM) | Complementary strand | 3809846 | 3810655 |
| JW3611(rpmG) | Complementary strand | 3810753 | 3810920 |
| JW3612(rpmB) | Complementary strand | 3810941 | 3811177 |
| JW3613(radC) | Complementary strand | 3811394 | 3812068 |
| JW3614(dfp) | | 3812162 | 3813454 |
| JW3615(dut) | | 3813435 | 3813890 |
| JW3616(ttk) | | 3813955 | 3814593 |
| JW3617(pyrE) | Complementary strand | 3814630 | 3815271 |
| JW3618(rph) | Complementary strand | 3815366 | 3816052 |
| JW3619(yicC) | | 3816179 | 3817042 |
| JW3620(dinD) | | 3817263 | 3818087 |
| JW3621(yicG) | | 3818377 | 3818994 |
| JW3622(yicF) | Complementary strand | 3818991 | 3820673 |
| JW3623(gmk) | | 3820931 | 3821554 |
| JW3624(rpoZ) | | 3821609 | 3821884 |
| JW3625(spoT) | | 3821903 | 3824011 |
| JW3626(spoU) | | 3824018 | 3824707 |
| JW3627(recG) | | 3824713 | 3826794 |
| JW3628(gltS) | Complementary strand | 3826963 | 3828168 |
| JW3629(yicE) | | 3828448 | 3829839 |
| JW3630(yicH) | | 3829960 | 3831669 |
| JW3631(yicI) | Complementary strand | 3831722 | 3834040 |
| JW3632(yicJ) | Complementary strand | 3834050 | 3835432 |
| JW3633(yicK) | | 3836456 | 3837640 |
| JW3634(yicL) | | 3837751 | 3838674 |
| JW3635(nlpA) | Complementary strand | 3838678 | 3839496 |
| JW3636.1(569#3.2) | | 3839718 | 3840011 |
| JW3637(yicM) | Complementary strand | 3840052 | 3841290 |
| JW3638(yicN) | Complementary strand | 3841453 | 3841932 |
| JW3639(yicO) | Complementary strand | 3841958 | 3843370 |
| JW3640(yicP) | | 3843467 | 3845233 |
| JW3641(uhpT) | Complementary strand | 3845279 | 3846670 |
| JW3642(uhpC) | Complementary strand | 3846808 | 3848127 |
| JW3643(uhpB) | Complementary strand | 3848137 | 3849639 |
| JW3644(uhpA) | Complementary strand | 3849639 | 3850229 |
| JW3645(ilvN) | Complementary strand | 3850305 | 3850595 |
| JW3646(ilvB) | Complementary strand | 3850599 | 3852287 |
| JW3647(ivbL) | Complementary strand | 3852393 | 3852491 |
| JW3648(567#1) | | 3853056 | 3853145 |
| JW3649(emrD) | | 3853419 | 3854609 |
| JW3650(yidF) | Complementary strand | 3854617 | 3855114 |
| JW3651(yidG) | Complementary strand | 3855111 | 3855473 |
| JW3652(yidH) | Complementary strand | 3855463 | 3855810 |
| JW3653(yidI) | | 3855918 | 3856367 |
| JW3654(yidJ) | Complementary strand | 3856414 | 3857907 |
| JW3655(yidK) | Complementary strand | 3857904 | 3859619 |
| JW3656(yidL) | | 3859756 | 3860679 |
| JW3657(567#9.1) | Complementary strand | 3860676 | 3860888 |
| JW3658(glvG) | Complementary strand | 3860852 | 3861490 |
| JW3659(glvB) | Complementary strand | 3861490 | 3861975 |
| JW3660(glvC) | Complementary strand | 3862000 | 3863106 |
| JW3661(yidP) | | 3863402 | 3864118 |
| JW3662(yidE) | Complementary strand | 3864115 | 3865776 |
| JW3663(ibpB) | Complementary strand | 3865972 | 3866400 |
| JW3664(ibpA) | Complementary strand | 3866512 | 3866925 |
| JW3665(yidQ) | | 3867156 | 3867563 |
| JW3666(yidR) | Complementary strand | 3867565 | 3868815 |
| JW3667(yidS) | | 3868859 | 3869944 |
| JW3668(dgoT) | Complementary strand | 3869941 | 3871278 |
| JW3669(dgoA) | Complementary strand | 3871353 | 3873116 |
| JW3670(dgoK) | Complementary strand | 3873100 | 3873978 |
| JW3671(dgoR) | Complementary strand | 3873975 | 3874271 |
| JW3672(yidW) | Complementary strand | 3874277 | 3874663 |
| JW3673(yidX) | | 3874998 | 3875669 |
| JW3674(yidA) | Complementary strand | 3875644 | 3876456 |
| JW3675(yidB) | Complementary strand | 3876571 | 3876969 |
| JW3676(gyrB) | Complementary strand | 3877209 | 3879623 |
| JW3677(recF) | Complementary strand | 3879652 | 3880725 |
| JW3678(dnaN) | Complementary strand | 3880725 | 3881825 |
| JW3679(dnaA) | Complementary strand | 3881830 | 3883233 |
| JW3680(rpmH) | | 3883841 | 3883981 |
| JW3681(rnpA) | | 3883998 | 3884357 |
| JW3682(yidD) | | 3884321 | 3884578 |
| JW3683(yidC) | | 3884581 | 3886227 |
| JW3684(thdF) | | 3886333 | 3887697 |
| JW3685(tnaL) | | 3887940 | 3888014 |
| JW3686(tnaA) | | 3888235 | 3889650 |
| JW3687(tnaB) | | 3889741 | 3890988 |
| JW3688(yidY) | | 3891120 | 3892295 |
| JW3689(yidZ) | | 3892270 | 3893229 |
| JW3690(yieE) | | 3893374 | 3894135 |
| JW3691(yieF) | | 3894157 | 3894723 |
| JW3692(yieG) | Complementary strand | 3894777 | 3896114 |
| JW3693(yieH) | | 3896279 | 3896944 |
| JW3694(yieI) | | 3897011 | 3897478 |
| JW3695(yieJ) | | 3897527 | 3898114 |
| JW3696(yieK) | Complementary strand | 3898187 | 3898828 |
| JW3697(yieL) | Complementary strand | 3898912 | 3900114 |
| JW3698(yieC) | Complementary strand | 3900108 | 3901724 |
| JW3699(bglB) | Complementary strand | 3901793 | 3903205 |
| JW3700(bglF) | Complementary strand | 3903224 | 3905101 |
| JW3701(bglG) | Complementary strand | 3905235 | 3906071 |
| JW3702(phoU) | Complementary strand | 3906357 | 3907082 |
| JW3703(pstB) | Complementary strand | 3907097 | 3907870 |
| JW3704(pstA) | Complementary strand | 3908053 | 3908943 |
| JW3705(pstC) | Complementary strand | 3908943 | 3909902 |
| JW3706(pstS) | Complementary strand | 3909989 | 3911029 |
| JW3707(glmS) | Complementary strand | 3911343 | 3913172 |
| JW3708(glmU) | Complementary strand | 3913334 | 3914704 |
| JW3709(atpC) | Complementary strand | 3915057 | 3915476 |
| JW3710(uncD) | Complementary strand | 3915497 | 3916879 |
| JW3711(atpG) | Complementary strand | 3916906 | 3917769 |
| JW3712(atpA) | Complementary strand | 3917820 | 3919361 |
| JW3713(atpH) | Complementary strand | 3919374 | 3919907 |
| JW3714(atpF) | Complementary strand | 3919922 | 3920392 |
| JW3715(atpE) | Complementary strand | 3920454 | 3920693 |
| JW3716(atpB) | Complementary strand | 3920740 | 3921555 |
| JW3717(atpI) | Complementary strand | 3921564 | 3921956 |
| JW3718(gidB) | Complementary strand | 3922561 | 3923184 |
| JW3719(gidA) | Complementary strand | 3923248 | 3925137 |
| JW3720(mioC) | Complementary strand | 3925516 | 3925959 |
| JW3721(asnC) | Complementary strand | 3926049 | 3926507 |
| JW3722(asnA) | | 3926659 | 3927651 |
| JW3723(yieM) | Complementary strand | 3927656 | 3928939 |
| JW3724(559#4) | Complementary strand | 3928924 | 3929106 |
| JW3725(yieN) | Complementary strand | 3929100 | 3930596 |
| JW3726(kup) | | 3930819 | 3932378 |
| JW3727(rbsD) | | 3932817 | 3933272 |
| JW3728(rbsA) | | 3933280 | 3934785 |
| JW3729(rbsC) | | 3934790 | 3935755 |
| JW3730(rbsB) | | 3935780 | 3936670 |
| JW3731(rbsK) | | 3936796 | 3937725 |
| JW3732(rbsR) | | 3937729 | 3938721 |
| JW3733(yieO) | Complementary strand | 3938687 | 3940114 |
| JW3734(yieP) | Complementary strand | 3940137 | 3940682 |
| JW3735(yifA) | Complementary strand | 3946628 | 3947224 |
| JW3736(pssR) | Complementary strand | 3947065 | 3947466 |
| JW3737(yifE) | | 3947585 | 3947923 |
| JW3738(yifB) | Complementary strand | 3947948 | 3949498 |
| JW3739(ilvL) | | 3949821 | 3949919 |
| JW3740(ilvG) | | 3950059 | 3951042 |
| JW3741(ilvG) | | 3951122 | 3951703 |
| JW3742(ilvM) | | 3951700 | 3951963 |
| JW3743(ilvE) | | 3951983 | 3952912 |
| JW3744(ilvD) | | 3953008 | 3954825 |
| JW3745(ilvA) | | 3954828 | 3956372 |
| JW3746(ilvY) | Complementary strand | 3956424 | 3957317 |
| JW3747(ilvC) | | 3957467 | 3958942 |
| JW3748(ppiC) | Complementary strand | 3959026 | 3959307 |
| JW3749(yifN) | Complementary strand | 3959503 | 3959778 |
| JW3750(yifN) | Complementary strand | 3959733 | 3959951 |
| JW3751(rep) | | 3960168 | 3962189 |
| JW3752(gppA) | Complementary strand | 3962236 | 3963720 |
| JW3753(rhlB) | Complementary strand | 3963856 | 3965121 |
| JW3754(trxA) | | 3965252 | 3965581 |
| JW3755(rhoL) | | 3965722 | 3965823 |
| JW3756(rho) | | 3965908 | 3967167 |
| JW3757(555#2.1) | | 3967177 | 3967395 |
| JW3758(rfe) | | 3967407 | 3968510 |
| JW3759(wzzE) | | 3968519 | 3969568 |
| JW3760(nfrC) | | 3969624 | 3970751 |
| JW3761(rffD) | | 3970748 | 3972010 |
| JW3762(rffG) | | 3972010 | 3973077 |
| JW3763(rffH) | | 3973096 | 3973977 |
| JW3764(yifH) | | 3974084 | 3974629 |
| JW3765(rffA) | | 3974634 | 3975764 |
| JW3766(wzxE) | | 3975766 | 3977016 |
| JW3767(554#5.1) | | 3977013 | 3977237 |
| JW3768(rffT) | | 3977152 | 3978093 |
| JW3769(rffT) | | 3978090 | 3979442 |
| JW3770(wecG) | | 3979445 | 3980185 |
| JW3771(yifK) | | 3980376 | 3981761 |
| JW3772(aslB) | | 3982447 | 3983682 |
| JW3773(aslA) | Complementary strand | 3983841 | 3985496 |
| JW3774(hemY) | Complementary strand | 3986175 | 3987371 |
| JW3775(hemX) | Complementary strand | 3987374 | 3988555 |
| JW3776(hemD) | Complementary strand | 3988577 | 3989317 |
| JW3777(hemC) | Complementary strand | 3989314 | 3990255 |
| JW3778(cyaA) | | 3990642 | 3993188 |
| JW3779(cyaY) | Complementary strand | 3993228 | 3993548 |
| JW3780(yzcX) | | 3993339 | 3993824 |
| JW3781(yifL) | | 3994011 | 3994214 |
| JW3782(dapF) | | 3994248 | 3995075 |
| JW3783(yigA) | | 3995072 | 3995779 |
| JW3784(xerC) | | 3995776 | 3996672 |
| JW3785(yigB) | | 3996672 | 3997388 |
| JW3786(uvrD) | | 3997472 | 3999634 |
| JW3787(yigE) | Complementary strand | 3999781 | 4000158 |
| JW3788(yigE) | Complementary strand | 4000059 | 4000544 |
| JW3789(corA) | | 4000914 | 4001864 |
| JW3790(yigF) | Complementary strand | 4001907 | 4002287 |
| JW3791(yigG) | Complementary strand | 4002301 | 4002717 |
| JW3792(radD) | Complementary strand | 4002776 | 4003678 |
| JW3793(yigH) | Complementary strand | 4003717 | 4004202 |
| JW3794(pldA) | | 4004349 | 4005218 |
| JW3795(recQ) | | 4005345 | 4007177 |
| JW3796(yigJ) | | 4007355 | 4007522 |
| JW3797(yigJ) | | 4007393 | 4007860 |
| JW3798(yigK) | Complementary strand | 4007922 | 4008338 |
| JW3799(551#4) | Complementary strand | 4008335 | 4008541 |
| JW3800(pldB) | | 4008652 | 4009674 |
| JW3801(yigL) | | 4009556 | 4009822 |
| JW3802(yigL) | | 4009794 | 4010309 |
| JW3803(yigM) | | 4010542 | 4011441 |
| JW3804(metR) | Complementary strand | 4011329 | 4012282 |
| JW3805(metE) | | 4012519 | 4014780 |
| JW3806(ysgA) | Complementary strand | 4014609 | 4015433 |
| JW3807(551#11.1) | Complementary strand | 4014820 | 4014993 |
| JW3808(udp) | | 4015894 | 4016655 |
| JW3809(yigN) | | 4016796 | 4018223 |
| JW3810(ubiE) | | 4018318 | 4019073 |
| JW3811(yigP) | | 4019087 | 4019692 |
| JW3812(aarF) | | 4019689 | 4021329 |
| JW3813(yigT) | | 4021408 | 4021677 |
| JW3814(yigT) | | 4021761 | 4022198 |
| JW3815(tatC) | | 4022201 | 4022977 |
| JW3816(tatD) | | 4023007 | 4023627 |
| JW3817(yigW) | | 4023554 | 4023802 |
| JW3818(rfaH) | Complementary strand | 4023799 | 4024287 |
| JW3819(ubiD) | | 4024454 | 4025947 |
| JW3820(ubiB) | | 4025993 | 4026694 |
| JW3821(fadA) | Complementary strand | 4027075 | 4028238 |
| JW3822(fadB) | Complementary strand | 4028248 | 4030437 |
| JW3823(pepQ) | | 4030627 | 4031958 |
| JW3824(yigZ) | | 4031955 | 4032572 |
| JW3825(trkH) | | 4032611 | 4033909 |
| JW3826(trkH) | | 4033867 | 4034061 |
| JW3827(hemG) | | 4034073 | 4034618 |
| JW3828(mobB) | Complementary strand | 4040362 | 4040889 |
| JW3829(mobA) | Complementary strand | 4040871 | 4041455 |
| JW3830(yihD) | | 4041525 | 4041794 |
| JW3831(yihE) | | 4041872 | 4042858 |
| JW3832(dsbA) | | 4042875 | 4043501 |
| JW3833(yihF) | | 4043613 | 4045085 |
| JW3834(yihG) | Complementary strand | 4045126 | 4046058 |
| JW3835(polA) | | 4046422 | 4049208 |
| JW3836(yihA) | Complementary strand | 4049589 | 4050188 |
| JW3837(yihI) | | 4050803 | 4051312 |
| JW3838(hemN) | | 4051501 | 4052874 |
| JW3839(ntrC) | Complementary strand | 4053325 | 4054734 |
| JW3840(ntrB) | Complementary strand | 4054746 | 4055795 |
| JW3841(glnA) | Complementary strand | 4056081 | 4057490 |
| JW3842(yihK) | | 4057863 | 4059638 |
| JW3843(yihL) | | 4059902 | 4060612 |
| JW3844(yihM) | | 4060620 | 4061600 |
| JW3845(yihN) | | 4061702 | 4062967 |
| JW3846(yshA) | Complementary strand | 4063058 | 4063750 |
| JW3847(yihO) | Complementary strand | 4063765 | 4065228 |
| JW3848(yihP) | Complementary strand | 4065265 | 4066671 |
| JW3849(yihQ) | Complementary strand | 4066696 | 4068732 |
| JW3850(yihR) | Complementary strand | 4068931 | 4069857 |
| JW3851(yihS) | Complementary strand | 4069971 | 4071227 |
| JW3852(yihT) | Complementary strand | 4071229 | 4072107 |
| JW3853(yihU) | Complementary strand | 4072131 | 4073027 |
| JW3854(yihV) | | 4073189 | 4074091 |
| JW3855(yihW) | | 4074101 | 4074910 |
| JW3856(yihX) | | 4074988 | 4075608 |
| JW3857(rbn) | | 4075602 | 4076474 |
| JW3858(yihZ) | | 4076471 | 4076908 |
| JW3859(yiiD) | | 4076905 | 4077894 |
| JW3860(yiiE) | | 4078720 | 4078965 |
| JW3861(yiiF) | | 4079183 | 4079425 |
| JW3862(fdhE) | Complementary strand | 4079755 | 4080684 |
| JW3863(fdoI) | Complementary strand | 4080681 | 4081316 |
| JW3864(fdoH) | Complementary strand | 4081313 | 4082215 |
| JW3865(fdoG) | Complementary strand | 4082228 | 4085278 |
| JW3866(fdhD) | | 4085472 | 4086305 |
| JW3867(yiiG) | | 4086458 | 4087513 |
| JW3868(frvR) | Complementary strand | 4087564 | 4089312 |
| JW3869(frvX) | Complementary strand | 4089312 | 4090382 |
| JW3870(frvB) | Complementary strand | 4090372 | 4091829 |
| JW3871(frvA) | Complementary strand | 4091834 | 4092280 |
| JW3872(yiiL) | Complementary strand | 4092581 | 4092895 |
| JW3873(rhaD) | Complementary strand | 4092905 | 4093729 |
| JW3874(rhaA) | Complementary strand | 4094180 | 4095439 |
| JW3875(rhaB) | Complementary strand | 4095436 | 4096905 |
| JW3876(rhaS) | | 4097193 | 4098029 |
| JW3877(rhaR) | | 4098013 | 4098951 |
| JW3878(rhaT) | Complementary strand | 4098948 | 4099982 |
| JW3879(sodA) | | 4100267 | 4100887 |
| JW3880(kdgT) | | 4101138 | 4102130 |
| JW3881(yiiM) | | 4102249 | 4102953 |
| JW3882(cpxA) | Complementary strand | 4103059 | 4104432 |
| JW3883(cpxR) | Complementary strand | 4104429 | 4105127 |
| JW3884(540#3.1) | | 4105274 | 4105423 |
| JW3885(cpxP) | | 4105408 | 4105776 |
| JW3886(yiiP) | | 4105925 | 4106827 |
| JW3887(pfkA) | | 4107008 | 4107970 |
| JW3888(sbp) | | 4108290 | 4109279 |
| JW3889(cdh) | | 4109386 | 4110141 |
| JW3890(tpiA) | Complementary strand | 4110196 | 4110963 |
| JW3891(yiiQ) | Complementary strand | 4111071 | 4111670 |
| JW3892(yiiR) | | 4111771 | 4112211 |
| JW3893(yiiS) | | 4112423 | 4112722 |
| JW3894(yiiT) | | 4112749 | 4113177 |
| JW3895(fpr) | Complementary strand | 4113182 | 4113928 |
| JW3896(glpX) | Complementary strand | 4114025 | 4115035 |
| JW3897(glpK) | Complementary strand | 4115170 | 4116678 |
| JW3898(glpF) | Complementary strand | 4116701 | 4117546 |
| JW3899(yiiU) | | 4117971 | 4118216 |
| JW3900(menG) | Complementary strand | 4118301 | 4118786 |
| JW3901(menA) | Complementary strand | 4118879 | 4119805 |
| JW3902(hslU) | Complementary strand | 4119872 | 4121203 |
| JW3903(hslV) | Complementary strand | 4121213 | 4121743 |
| JW3904(ftsN) | Complementary strand | 4121836 | 4122795 |
| JW3905(cytR) | Complementary strand | 4122887 | 4123912 |
| JW3906(priA) | Complementary strand | 4124068 | 4126266 |
| JW3907(rpmE) | | 4126469 | 4126681 |
| JW3908(yiiX) | Complementary strand | 4126742 | 4127350 |
| JW3909(metJ) | Complementary strand | 4127534 | 4127851 |
| JW3910(metB) | | 4128128 | 4129288 |
| JW3911(metL) | | 4129291 | 4131723 |
| JW3912(537#1.1) | Complementary strand | 4131862 | 4132410 |
| JW3913(metF) | | 4132072 | 4132962 |
| JW3914(katG) | | 4133291 | 4135471 |
| JW3915(yijE) | | 4135531 | 4136469 |
| JW3916(yijF) | Complementary strand | 4136496 | 4137113 |
| JW3917(gldA) | Complementary strand | 4137388 | 4138530 |
| JW3918(talC) | Complementary strand | 4138502 | 4139164 |
| JW3919(ptsA) | Complementary strand | 4139176 | 4141311 |
| JW3920(536#1) | | 4141169 | 4141642 |
| JW3921(frwC) | | 4141985 | 4143064 |
| JW3922(frwB) | | 4143079 | 4143399 |
| JW3923(pflD) | | 4143450 | 4145747 |
| JW3924(pflC) | | 4145713 | 4146591 |
| JW3925(frwD) | | 4146593 | 4146934 |
| JW3926(yijO) | Complementary strand | 4146921 | 4147772 |
| JW3927(yijP) | Complementary strand | 4147987 | 4149720 |
| JW3928(ppc) | Complementary strand | 4149902 | 4152553 |
| JW3929(argE) | Complementary strand | 4153151 | 4154302 |
| JW3930(argC) | | 4154456 | 4155460 |
| JW3931(argB) | | 4155468 | 4156244 |
| JW3932(argH) | | 4156305 | 4157678 |
| JW3933(oxyR) | | 4157945 | 4158862 |
| JW3934(udhA) | Complementary strand | 4158845 | 4160179 |
| JW3935(yijC) | | 4160522 | 4161226 |
| JW3936(yijD) | | 4161226 | 4161585 |
| JW3937(trmA) | Complementary strand | 4161625 | 4162725 |
| JW3938(btuB) | | 4163094 | 4164938 |
| JW3939(murI) | | 4164871 | 4165740 |
| JW3940(murB) | | 4171512 | 4172540 |
| JW3941(birA) | | 4172537 | 4173502 |
| JW3942(coaA) | Complementary strand | 4173531 | 4174481 |
| JW3943(tufB) | | 4175399 | 4176583 |
| JW3944(secE) | | 4176813 | 4177196 |
| JW3945(nusG) | | 4177198 | 4177743 |
| JW3946(rplK) | | 4177901 | 4178329 |
| JW3947(rplA) | | 4178333 | 4179037 |
| JW3948(rplJ) | | 4179450 | 4179947 |
| JW3949(rplL) | | 4180014 | 4180379 |
| JW3950(rpoB) | | 4180699 | 4184727 |
| JW3951(rpoC) | | 4184804 | 4189027 |
| JW3952(htrC) | | 4189240 | 4189779 |
| JW3953(thiH) | Complementary strand | 4190189 | 4191322 |
| JW3954(thiG) | Complementary strand | 4191319 | 4192164 |
| JW3955(thiS) | Complementary strand | 4192091 | 4192291 |
| JW3956(thiF) | Complementary strand | 4192275 | 4193030 |
| JW3957(thiE) | Complementary strand | 4193023 | 4193658 |
| JW3958(thiC) | Complementary strand | 4193658 | 4195553 |
| JW3959(rsd) | Complementary strand | 4195786 | 4196262 |
| JW3960(yjaD) | | 4196357 | 4197130 |
| JW3961(hemE) | | 4197170 | 4198234 |
| JW3962(nfi) | | 4198238 | 4198915 |
| JW3963(yjaG) | | 4198958 | 4199548 |
| JW3964(hupA) | | 4199735 | 4200007 |
| JW3965(yjaH) | | 4200020 | 4200715 |
| JW3966(yjaI) | Complementary strand | 4200717 | 4201283 |
| JW3967(hydH) | | 4201380 | 4202777 |
| JW3968(hydG) | | 4202774 | 4204099 |
| JW3969(purD) | Complementary strand | 4204096 | 4205385 |
| JW3970(purH) | Complementary strand | 4205397 | 4206986 |
| JW3971(yjaA) | | 4212689 | 4213072 |
| JW3972(yjaB) | Complementary strand | 4213135 | 4213578 |
| JW3973(metA) | | 4213735 | 4214664 |
| JW3974(aceB) | | 4214933 | 4216534 |
| JW3975(aceA) | | 4216564 | 4217868 |
| JW3976(aceK) | | 4218051 | 4219787 |
| JW3977(arp) | Complementary strand | 4219756 | 4221942 |
| JW3978(iclR) | Complementary strand | 4222259 | 4223083 |
| JW3979(metH) | | 4223283 | 4226966 |
| JW3980(yjbB) | | 4227186 | 4228817 |
| JW3981(pepE) | Complementary strand | 4228908 | 4229597 |
| JW3982(yjbC) | | 4229809 | 4230681 |
| JW3983(yjbD) | Complementary strand | 4230814 | 4231086 |
| JW3984(lysC) | Complementary strand | 4231339 | 4232688 |
| JW3985(pgi) | | 4233213 | 4234862 |
| JW3986(633#6) | | 4235361 | 4235603 |
| JW3987(yjbF) | | 4235687 | 4236355 |
| JW3988(yjbG) | | 4236352 | 4237089 |
| JW3989(yjbH) | | 4237089 | 4239185 |
| JW3989.5(633#10) | Complementary strand | 4239232 | 4239510 |
| JW3990(yjbA) | | 4239780 | 4240190 |
| JW3991(xylE) | Complementary strand | 4240234 | 4241709 |
| JW3992(malG) | Complementary strand | 4242081 | 4242971 |
| JW3993(malF) | Complementary strand | 4242986 | 4244530 |
| JW3994(malE) | Complementary strand | 4244684 | 4245874 |
| JW3995(malK) | | 4246239 | 4247354 |
| JW3996(lamB) | | 4247426 | 4248766 |
| JW3997(malM) | | 4249009 | 4249929 |
| JW3998(yjbI) | | 4250410 | 4251738 |
| JW3999(ubiC) | | 4251850 | 4252458 |
| JW4000(ubiA) | | 4252471 | 4253343 |
| JW4001(plsB) | Complementary strand | 4253498 | 4255921 |
| JW4002(dgkA) | | 4256092 | 4256460 |
| JW4003(lexA) | | 4256570 | 4257178 |
| JW4004(dinF) | | 4257197 | 4258576 |
| JW4005(yjbJ) | | 4258692 | 4258901 |
| JW4006(yjbK) | Complementary strand | 4258943 | 4259518 |
| JW4007(yjbL) | | 4259776 | 4260030 |
| JW4008(yjbM) | | 4260054 | 4260761 |
| JW4009(yjbN) | | 4261124 | 4262161 |
| JW4010(yjbO) | | 4262085 | 4262537 |
| JW4011(qor) | Complementary strand | 4262703 | 4263686 |
| JW4012(dnaB) | | 4263769 | 4265184 |
| JW4013(alr) | | 4265237 | 4266316 |
| JW4014(tyrB) | | 4266569 | 4267762 |
| JW4015(napA) | | 4268869 | 4269582 |
| JW4016(hobH) | Complementary strand | 4269310 | 4269537 |
| JW4017(yjbQ) | | 4269693 | 4270109 |
| JW4018(yjbR) | | 4270113 | 4270469 |
| JW4019(uvrA) | Complementary strand | 4270504 | 4273326 |
| JW4020(ssb) | | 4273580 | 4274116 |
| JW4021(yjcB) | Complementary strand | 4274215 | 4274565 |
| JW4022(yjcC) | | 4274926 | 4276512 |
| JW4023(soxS) | Complementary strand | 4276515 | 4276838 |
| JW4024(soxR) | | 4276924 | 4277388 |
| JW4025(yjcD) | | 4277934 | 4279283 |
| JW4026(yjcE) | | 4279435 | 4281084 |
| JW4027(yjcF) | Complementary strand | 4281238 | 4282530 |
| JW4028(yjcG) | Complementary strand | 4282708 | 4284357 |
| JW4029(yjcH) | Complementary strand | 4284354 | 4284668 |
| JW4030(acs) | Complementary strand | 4284868 | 4286826 |
| JW4031(nrfA) | | 4287219 | 4288655 |
| JW4032(nrfB) | | 4288700 | 4289266 |
| JW4033(nrfC) | | 4289263 | 4289934 |
| JW4034(nrfD) | | 4289931 | 4290887 |
| JW4035(nrfE) | | 4290967 | 4292625 |
| JW4036(nrfF) | | 4292618 | 4293001 |
| JW4037(nrfG) | | 4292998 | 4293594 |
| JW4038(gltP) | | 4293936 | 4295249 |
| JW4039(yjcO) | Complementary strand | 4295891 | 4296580 |
| JW4040(fdhF) | Complementary strand | 4296674 | 4298821 |
| JW4041(yjcP) | Complementary strand | 4299019 | 4300485 |
| JW4042(yjcQ) | Complementary strand | 4300482 | 4302533 |
| JW4043(yjcR) | Complementary strand | 4302533 | 4303564 |
| JW4044(yjcS) | Complementary strand | 4304067 | 4306064 |
| JW4045(alsK) | Complementary strand | 4306325 | 4307254 |
| JW4046(alsE) | Complementary strand | 4307238 | 4307933 |
| JW4047(alsC) | Complementary strand | 4307944 | 4308924 |
| JW4048(alsA) | Complementary strand | 4308903 | 4310435 |
| JW4049(alsB) | Complementary strand | 4310562 | 4311497 |
| JW4050(alsR) | Complementary strand | 4311556 | 4312446 |
| JW4051(rpiB) | | 4312805 | 4313254 |
| JW4052(phnQ) | Complementary strand | 4313265 | 4313672 |
| JW4053(phnP) | Complementary strand | 4313798 | 4314556 |
| JW4054(phnO) | Complementary strand | 4314558 | 4314992 |
| JW4055(phnN) | Complementary strand | 4314979 | 4315536 |
| JW4056(phnM) | Complementary strand | 4315536 | 4316672 |
| JW4057(phnL) | Complementary strand | 4316669 | 4317349 |
| JW4058(phnK) | Complementary strand | 4317460 | 4318218 |
| JW4059(phnJ) | Complementary strand | 4318215 | 4319060 |
| JW4060(phnI) | Complementary strand | 4319053 | 4320117 |
| JW4061(phnH) | Complementary strand | 4320117 | 4320701 |
| JW4062(phnG) | Complementary strand | 4320698 | 4321150 |
| JW4063(phnF) | Complementary strand | 4321151 | 4321876 |
| JW4064(phnE) | Complementary strand | 4321897 | 4322265 |
| JW4065(phnE) | Complementary strand | 4322115 | 4322735 |
| JW4066(phnD) | Complementary strand | 4322790 | 4323806 |
| JW4067(phnC) | Complementary strand | 4323831 | 4324619 |
| JW4068(phnB) | Complementary strand | 4324752 | 4325195 |
| JW4069(phnA) | Complementary strand | 4325853 | 4326188 |
| JW4070(yjdA) | | 4326589 | 4328817 |
| JW4071(yjcZ) | | 4328847 | 4329692 |
| JW4072(proP) | | 4329956 | 4331458 |
| JW4073(basS) | Complementary strand | 4331635 | 4332726 |
| JW4074(basR) | Complementary strand | 4332736 | 4333404 |
| JW4075(yjdB) | Complementary strand | 4333401 | 4335074 |
| JW4076(yjdE) | Complementary strand | 4335148 | 4336485 |
| JW4077(adiY) | Complementary strand | 4336622 | 4337383 |
| JW4078(adi) | Complementary strand | 4337708 | 4339975 |
| JW4079(melR) | Complementary strand | 4340174 | 4341082 |
| JW4080(melA) | | 4341365 | 4342720 |
| JW4081(melB) | | 4342835 | 4344244 |
| JW4082(yjdF) | Complementary strand | 4344383 | 4345012 |
| JW4083(fumB) | Complementary strand | 4345134 | 4346780 |
| JW4084(dcuB) | Complementary strand | 4346858 | 4348198 |
| JW4085(dcuR) | Complementary strand | 4348769 | 4349488 |
| JW4086(dcuS) | Complementary strand | 4349485 | 4351116 |
| JW4087(yjdI) | | 4351297 | 4351527 |
| JW4088(yjdJ) | | 4351539 | 4351811 |
| JW4089(yjdK) | | 4352038 | 4352334 |
| JW4090(lysU) | Complementary strand | 4352654 | 4354171 |
| JW4091(yjdL) | Complementary strand | 4354408 | 4355865 |
| JW4092(cadA) | Complementary strand | 4355924 | 4358071 |
| JW4093(cadB) | Complementary strand | 4358151 | 4359485 |
| JW4094(cadC) | Complementary strand | 4359850 | 4361388 |
| JW4095(cutA3) | Complementary strand | 4362187 | 4362786 |
| JW4096(cutA2) | Complementary strand | 4362799 | 4364268 |
| JW4097(cutA) | Complementary strand | 4364472 | 4364810 |
| JW4098(dcuA) | Complementary strand | 4364926 | 4366227 |
| JW4099(aspA) | Complementary strand | 4366345 | 4367781 |
| JW4100(fxsA) | | 4368118 | 4368594 |
| JW4101(yjeH) | Complementary strand | 4368610 | 4369866 |
| JW4102(groES) | | 4370142 | 4370435 |
| JW4103(groEL) | | 4370479 | 4372125 |
| JW4104(yjeI) | | 4372230 | 4372616 |
| JW4105(yjeJ) | Complementary strand | 4372819 | 4373688 |
| JW4106(yjeK) | Complementary strand | 4374083 | 4375111 |
| JW4107(efp) | | 4375153 | 4375719 |
| JW4108(ecnB) | | 4376007 | 4376153 |
| JW4109(sugE) | | 4376179 | 4376646 |
| JW4110(blc) | Complementary strand | 4376643 | 4377176 |
| JW4111(ampC) | Complementary strand | 4377265 | 4378398 |
| JW4112(frdD) | Complementary strand | 4378461 | 4378820 |
| JW4113(frdC) | Complementary strand | 4378831 | 4379226 |
| JW4114(frdB) | Complementary strand | 4379237 | 4379971 |
| JW4115(frdA) | Complementary strand | 4379964 | 4381772 |
| JW4116(genX) | | 4382097 | 4383074 |
| JW4117(yjeM) | | 4383251 | 4384795 |
| JW4118(yjeN) | | 4384847 | 4385161 |
| JW4119(yjeO) | | 4385158 | 4385472 |
| JW4120(yjeP) | Complementary strand | 4385501 | 4388824 |
| JW4121(psd) | Complementary strand | 4388846 | 4389814 |
| JW4122(yjeQ) | Complementary strand | 4389911 | 4390963 |
| JW4123(yjeR) | | 4390989 | 4391603 |
| JW4124(yjeS) | Complementary strand | 4392382 | 4393521 |
| JW4125(yjeF) | | 4393520 | 4395067 |
| JW4126(yjeE) | | 4395039 | 4395500 |
| JW4127(amiB) | | 4395519 | 4396856 |
| JW4128(mutL) | | 4396866 | 4398713 |
| JW4129(miaA) | | 4398706 | 4399656 |
| JW4130(hfq) | | 4399742 | 4400050 |
| JW4131(hflX) | | 4400126 | 4401406 |
| JW4132(hflK) | | 4401492 | 4402751 |
| JW4133(hflC) | | 4402754 | 4403758 |
| JW4134(yjeT) | | 4403840 | 4404037 |
| JW4135(purA) | | 4404141 | 4405439 |
| JW4136(yjeB) | | 4405644 | 4406069 |
| JW4137(vacB) | | 4406066 | 4408549 |
| JW4138(yjfH) | | 4408729 | 4409460 |
| JW4139(yjfI) | | 4409587 | 4409988 |
| JW4140(yjfJ) | | 4410007 | 4410705 |
| JW4141(yjfK) | | 4410756 | 4411415 |
| JW4142(yjfL) | | 4411433 | 4411831 |
| JW4143(yjfM) | | 4411841 | 4412479 |
| JW4144(yjfC) | | 4412482 | 4413645 |
| JW4145(aidB) | | 4413714 | 4415354 |
| JW4146(yjfN) | Complementary strand | 4415471 | 4415773 |
| JW4147(yjfO) | Complementary strand | 4415895 | 4416323 |
| JW4148(yjfP) | | 4416406 | 4417155 |
| JW4149(yjfQ) | Complementary strand | 4417152 | 4417907 |
| JW4150(yjfR) | Complementary strand | 4418015 | 4419085 |
| JW4151(sgaT) | | 4419377 | 4420831 |
| JW4152(sgaB) | | 4420847 | 4421152 |
| JW4153(sgaA) | | 4421162 | 4421626 |
| JW4154(sgaH) | | 4421640 | 4422290 |
| JW4155(sgaU) | | 4422300 | 4423154 |
| JW4156(sgaE) | | 4423154 | 4423840 |
| JW4157(yjfY) | Complementary strand | 4423970 | 4424245 |
| JW4158(rpsF) | | 4424572 | 4424967 |
| JW4159(priB) | | 4424974 | 4425288 |
| JW4160(rpsR) | | 4425293 | 4425520 |
| JW4161(rplI) | | 4425562 | 4426011 |
| JW4162(yjfZ) | Complementary strand | 4426082 | 4426876 |
| JW4163(ytfA) | | 4427223 | 4427549 |
| JW4164(ytfB) | Complementary strand | 4427533 | 4428207 |
| JW4165(fklB) | | 4428230 | 4429009 |
| JW4166(cycA) | | 4429318 | 4430730 |
| JW4167(ytfE) | Complementary strand | 4430775 | 4431437 |
| JW4168(ytfF) | Complementary strand | 4431545 | 4432519 |
| JW4169(ytfG) | Complementary strand | 4432618 | 4433478 |
| JW4170(ytfH) | | 4433477 | 4433947 |
| JW4171(cpdB) | Complementary strand | 4434076 | 4436019 |
| JW4172(cysQ) | | 4436209 | 4436949 |
| JW4173(ytfI) | | 4437161 | 4437661 |
| JW4174.1(657#1.2) | | 4437652 | 4438098 |
| JW4175(ytfJ) | Complementary strand | 4438161 | 4438715 |
| JW4176(ytfK) | | 4439001 | 4439246 |
| JW4177(ytfL) | Complementary strand | 4439325 | 4440668 |
| JW4178(msrA) | Complementary strand | 4440991 | 4441629 |
| JW4179(ytfM) | | 4441835 | 4443568 |
| JW4180(ytfN) | | 4443565 | 4447344 |
| JW4181(ytfP) | | 4447347 | 4447688 |
| JW4182(yzfA) | Complementary strand | 4447429 | 4447698 |
| JW4183(chpS) | | 4447894 | 4448151 |
| JW4184(chpB) | | 4448145 | 4448495 |
| JW4185(ppa) | Complementary strand | 4448575 | 4449105 |
| JW4186(ytfQ) | | 4449415 | 4450371 |
| JW4187(ytfR) | | 4450509 | 4451762 |
| JW4188(ytfS) | | 4451738 | 4452010 |
| JW4189(ytfT) | | 4452021 | 4453046 |
| JW4190(yjfF) | | 4453057 | 4454028 |
| JW4191(fbp) | Complementary strand | 4454061 | 4455059 |
| JW4192(mpl) | | 4455235 | 4456608 |
| JW4193(yjgA) | Complementary strand | 4456764 | 4457315 |
| JW4194(pmbA) | | 4457409 | 4458761 |
| JW4195(cybC) | | 4459003 | 4459305 |
| JW4196(nrdG) | Complementary strand | 4459350 | 4459814 |
| JW4197(nrdD) | Complementary strand | 4459972 | 4462110 |
| JW4198(treC) | Complementary strand | 4462504 | 4464159 |
| JW4199(treB) | Complementary strand | 4464209 | 4465630 |
| JW4200(treR) | Complementary strand | 4465749 | 4466696 |
| JW4201(mgtA) | | 4467075 | 4469771 |
| JW4202(yjgF) | Complementary strand | 4469977 | 4470402 |
| JW4203(pyrI) | Complementary strand | 4470436 | 4470897 |
| JW4204(pyrB) | Complementary strand | 4470910 | 4471845 |
| JW4205(pyrBI) | Complementary strand | 4471849 | 4471983 |
| JW4206(yjgH) | Complementary strand | 4472264 | 4472659 |
| JW4207(yjgI) | Complementary strand | 4472790 | 4473503 |
| JW4208(yjgJ) | | 4473574 | 4474167 |
| JW4209(yjgK) | | 4474303 | 4474764 |
| JW4210(yjgL) | | 4474851 | 4476701 |
| JW4211(argI) | Complementary strand | 4476746 | 4477750 |
| JW4212(yjgD) | | 4477912 | 4478328 |
| JW4213(yjgM) | Complementary strand | 4478473 | 4478766 |
| JW4214(yjgN) | | 4479186 | 4480367 |
| JW4215(valS) | Complementary strand | 4480426 | 4483281 |
| JW4216(holC) | Complementary strand | 4483281 | 4483724 |
| JW4217(xerB) | Complementary strand | 4483884 | 4485395 |
| JW4218(yjgP) | | 4485662 | 4486762 |
| JW4219(yjgQ) | | 4486759 | 4487844 |
| JW4220(yjgR) | Complementary strand | 4488005 | 4489507 |
| JW4221(idnR) | Complementary strand | 4489585 | 4490583 |
| JW4222(idnT) | Complementary strand | 4490650 | 4491969 |
| JW4223(idnO) | Complementary strand | 4492031 | 4492795 |
| JW4224(idnD) | Complementary strand | 4492819 | 4493850 |
| JW4225(idnK) | | 4494067 | 4494630 |
| JW4226(yjgB) | Complementary strand | 4494634 | 4495695 |
| JW4227(intB) | | 4496194 | 4497384 |
| JW4228(660#10.1) | Complementary strand | 4497565 | 4497705 |
| JW4229(yi2A) | | 4497671 | 4498081 |
| JW4230(yi22) | | 4498039 | 4498944 |
| JW4231(yi24) | Complementary strand | 4498084 | 4498515 |
| JW4232(yi23) | | 4498112 | 4498405 |
| JW4233(yjgW) | | 4499043 | 4499378 |
| JW4234(yjgX) | Complementary strand | 4499487 | 4499933 |
| JW4235(yjgY) | Complementary strand | 4499876 | 4500325 |
| JW4236(yjgZ) | | 4500704 | 4501033 |
| JW4237(yi41) | Complementary strand | 4501547 | 4502893 |
| JW4238(yi42) | | 4502279 | 4502746 |
| JW4239(yjhB) | | 4503442 | 4504719 |
| JW4240(yjhC) | | 4504716 | 4505849 |
| JW4241(yjhD) | Complementary strand | 4506070 | 4506444 |
| JW4242(yjhE) | | 4506305 | 4506553 |
| JW4243(yi91) | | 4506605 | 4506907 |
| JW4244(662#3.2) | Complementary strand | 4506910 | 4508061 |
| JW4245(662#4) | | 4508402 | 4508998 |
| JW4246(662#5) | | 4509164 | 4509577 |
| JW4247(fecE) | Complementary strand | 4510134 | 4510901 |
| JW4248(fecD) | Complementary strand | 4510902 | 4511858 |
| JW4249(fecC) | Complementary strand | 4511855 | 4512853 |
| JW4250(fecB) | Complementary strand | 4512850 | 4513752 |
| JW4251(fecA) | Complementary strand | 4513797 | 4516121 |
| JW4252(fecR) | Complementary strand | 4516208 | 4517161 |
| JW4253(fecI) | Complementary strand | 4517158 | 4517679 |
| JW4254(insA) | | 4517971 | 4518246 |
| JW4255(insB) | | 4518165 | 4518458 |
| JW4256(insB) | | 4518459 | 4518668 |
| JW4257(yjhU) | Complementary strand | 4518782 | 4519582 |
| JW4258(yjhF) | Complementary strand | 4520115 | 4521464 |
| JW4259(yjhG) | Complementary strand | 4521571 | 4523538 |
| JW4260(yjhH) | Complementary strand | 4523549 | 4524508 |
| JW4261(yjhI) | Complementary strand | 4524459 | 4525247 |
| JW4262(sgcR) | Complementary strand | 4525550 | 4526332 |
| JW4263(sgcE) | Complementary strand | 4526349 | 4526981 |
| JW4264(sgcA) | Complementary strand | 4526993 | 4527424 |
| JW4265(sgcQ) | Complementary strand | 4527555 | 4528361 |
| JW4266(sgcC) | Complementary strand | 4528374 | 4529687 |
| JW4266.5(664#6) | Complementary strand | 4529699 | 4529977 |
| JW4267(sgcX) | Complementary strand | 4529974 | 4531125 |
| JW4268(yjhP) | Complementary strand | 4531881 | 4532627 |
| JW4269(yjhQ) | Complementary strand | 4532683 | 4533228 |
| JW4269.5(664#11) | Complementary strand | 4533240 | 4533497 |
| JW4270(664#12) | Complementary strand | 4533988 | 4534119 |
| JW4270.5(664#13) | | 4534283 | 4534492 |
| JW4271(yjhR) | | 4534459 | 4535475 |
| JW4272(yjhS) | Complementary strand | 4536058 | 4537038 |
| JW4273(yjhT) | Complementary strand | 4537103 | 4538317 |
| JW4274(yjhA) | Complementary strand | 4538229 | 4538954 |
| JW4275(fimB) | | 4540401 | 4541003 |
| JW4276(fimE) | | 4541481 | 4542077 |
| JW4277(fimA) | | 4542559 | 4543107 |
| JW4278(fimI) | | 4543064 | 4543711 |
| JW4279(fimC) | | 4543748 | 4544473 |
| JW4280(fimD) | | 4544541 | 4547177 |
| JW4281(fimF) | | 4547187 | 4547717 |
| JW4282(fimG) | | 4547730 | 4548233 |
| JW4283(fimH) | | 4548253 | 4549155 |
| JW4284(gntP) | Complementary strand | 4549398 | 4550741 |
| JW4285(uxuA) | | 4551081 | 4552265 |
| JW4286(uxuB) | | 4552346 | 4553806 |
| JW4287(uxuR) | | 4554021 | 4554794 |
| JW4288(yjiC) | Complementary strand | 4554935 | 4555765 |
| JW4289(yjiD) | | 4556429 | 4556830 |
| JW4290(yjiE) | Complementary strand | 4556823 | 4557734 |
| JW4291(iadA) | Complementary strand | 4557799 | 4558971 |
| JW4292(yjiG) | Complementary strand | 4558984 | 4559445 |
| JW4293(yjiH) | Complementary strand | 4559442 | 4560137 |
| JW4294(yjiI) | | 4560273 | 4560929 |
| JW4295(yjiJ) | Complementary strand | 4560942 | 4562120 |
| JW4296(yjiK) | Complementary strand | 4562188 | 4563159 |
| JW4296.5(668#5) | Complementary strand | 4563113 | 4563370 |
| JW4297(yjiL) | Complementary strand | 4563367 | 4564140 |
| JW4298(yjiM) | Complementary strand | 4564144 | 4565316 |
| JW4299(yjiN) | Complementary strand | 4565411 | 4566691 |
| JW4300(yjiO) | Complementary strand | 4566732 | 4567964 |
| JW4301(yjiP) | | 4568443 | 4568754 |
| JW4302(yjiQ) | | 4568803 | 4569363 |
| JW4303(yjiR) | Complementary strand | 4569607 | 4571019 |
| JW4304(yjiS) | | 4571196 | 4571360 |
| JW4305(yjiT) | | 4571811 | 4573376 |
| JW4306(yjiV) | | 4573580 | 4575121 |
| JW4307(mcrD) | | 4575072 | 4576301 |
| JW4308(mcrC) | Complementary strand | 4576358 | 4577434 |
| JW4309(mcrB) | Complementary strand | 4577404 | 4578801 |
| JW4310(yjiW) | Complementary strand | 4578945 | 4579343 |
| JW4311(hsdS) | Complementary strand | 4579514 | 4580908 |
| JW4312(hsdM) | Complementary strand | 4580905 | 4582494 |
| JW4313(hsdR) | Complementary strand | 4582695 | 4586261 |
| JW4314(mrr) | | 4586395 | 4587309 |
| JW4315(yjiA) | Complementary strand | 4587355 | 4588209 |
| JW4316(yjiX) | Complementary strand | 4588322 | 4588525 |
| JW4317(yjiY) | Complementary strand | 4588575 | 4590740 |
| JW4318(tsr) | | 4591103 | 4592758 |
| JW4319(yjjL) | Complementary strand | 4592807 | 4594168 |
| JW4320(671#8) | | 4592916 | 4593062 |
| JW4321(yjjM) | Complementary strand | 4594383 | 4595189 |
| JW4322(yjjN) | | 4595420 | 4596457 |
| JW4323(mdoB) | Complementary strand | 4596595 | 4598847 |
| JW4324(yjjA) | Complementary strand | 4599140 | 4599637 |
| JW4325(dnaC) | Complementary strand | 4599683 | 4600420 |
| JW4326(dnaT) | Complementary strand | 4600423 | 4600962 |
| JW4327(yjjB) | Complementary strand | 4601069 | 4601395 |
| JW4328(yjjP) | Complementary strand | 4601533 | 4602366 |
| JW4329(yjjQ) | | 4602922 | 4603647 |
| JW4330(bglJ) | | 4603605 | 4604282 |
| JW4331(fhuF) | Complementary strand | 4604320 | 4605108 |
| JW4332(yjjZ) | | 4605210 | 4605485 |
| JW4333(rsmC) | Complementary strand | 4606114 | 4607145 |
| JW4334(holD) | | 4607248 | 4607661 |
| JW4335(rimI) | | 4607630 | 4608076 |
| JW4336(yjjG) | | 4608091 | 4608768 |
| JW4337(prfC) | | 4608859 | 4610448 |
| JW4338(osmY) | | 4610841 | 4611446 |
| JW4339(674#2) | | 4611555 | 4611734 |
| JW4340(yjjU) | | 4611856 | 4612929 |
| JW4341(yjjV) | | 4612926 | 4613705 |
| JW4342(yjjW) | Complementary strand | 4614125 | 4614988 |
| JW4343(yjjI) | Complementary strand | 4614960 | 4616510 |
| JW4344(deoC) | | 4616768 | 4617547 |
| JW4345(deoA) | | 4617674 | 4618996 |
| JW4346(deoB) | | 4619048 | 4620271 |
| JW4347(deoD) | | 4620328 | 4621047 |
| JW4348(yjjJ) | | 4621214 | 4622545 |
| JW4349(lplA) | Complementary strand | 4622546 | 4623562 |
| JW4350(smp) | Complementary strand | 4623590 | 4624234 |
| JW4351(serB) | | 4624340 | 4625308 |
| JW4352(radA) | | 4625357 | 4626739 |
| JW4353(nadR) | | 4626739 | 4627992 |
| JW4354(yjjK) | Complementary strand | 4628300 | 4629967 |
| JW4355(slt) | | 4630178 | 4632115 |
| JW4356(trpR) | | 4632205 | 4632531 |
| JW4357(yjjX) | Complementary strand | 4632678 | 4633199 |
| JW4358(gpmG) | | 4633242 | 4633889 |
| JW4359(rob) | Complementary strand | 4633886 | 4634755 |
| JW4360(creA) | | 4634966 | 4635439 |
| JW4361(creB) | | 4635452 | 4636141 |
| JW4362(creC) | | 4636141 | 4637565 |
| JW4363(creD) | | 4637623 | 4638975 |
| JW4364(arcA) | Complementary strand | 4639035 | 4639751 |
| JW4365(yjjY) | | 4639847 | 4639987 |
| JW4366(lasT) | | 4640387 | 4641073 |
| JW4367(thrL) | | 4641287 | 4641352 |

[0430] Further, the E. coli mutant strain of the present invention includes; (43) The E. coli mutant strain according to any one of (1) to (42) obtained via modification by a method selected from among the following [1] to [4]:
[0431] [1] a method for increasing the expression level of at least one enzyme associated with biosynthesis of the useful substance;
[0432] [2] a method for increasing the copy number of at least one enzyme gene associated with biosynthesis of the useful substance;
[0433] [3] a method for attenuating or blocking at least one metabolic pathway which branches from the biosynthetic pathway of the useful substance into metabolites other than the useful substance; or
[0434] [4] a method for selecting a strain that exhibits higher resistance to an analogue of a useful substance than a wild-type E. coli strain.

[0435] The E. coli mutant strains described in (1) to (42) above appear to lack parts of or entire genes that encode proteins that are not directly involved in biosynthesis of useful substances but indirectly suppress generation of such useful substances. Such mutant strains and the mutant strain (43) are useful for producing useful substances.

[0436] The E. coli mutant strain of the present invention may be any E. coli mutant strain, provided that it belongs to Escherichia coli. It is preferably a mutant strain of the E. coli K-12 strain, the E. coli B strain, or the E. coli W strain, more preferably a mutant strain of the E. coli K-12 strain, further preferably a mutant strain of the E. coli W3110 strain (ATCC27325) or the E. coli MG1655 strain (ATCC47076), and particularly preferably a mutant strain of the E. coli W3110 strain (ATCC27325), for example.

2. Method for Producing the E. coli Mutant Strain of the Present Invention

[0437] The E. coli mutant strain of the present invention can be obtained by any method, provided that it allows such mutant strain to be obtained. For example, the following method wherein a given gene or DNA on E. coli chromosomal DNA is deleted may be employed.

[0438] A gene or DNA of E. coli chromosomal DNA can be deleted via a method utilizing homologous recombination, for example. An example of a method utilizing general homologous recombination is a method involving the use of plasmids for homologous recombination that can be prepared by ligating DNA fragments located at both outer sides of the gene or DNA that is intended to be deleted on E. coli chromosomal DNA to plasmid DNA having a drug-resistant gene that cannot be autonomously replicated in such E. coli.

[0439] After the plasmids for homologous recombination are introduced into a host cell by a conventional method, transformants into which the plasmids for homologous recombination have been integrated to chromosomal DNA by homologous recombination are selected using the drug resistance as an indicator. The obtained transformants are cultured in a medium that does not contain the aforementioned drug for several hours to 1 day, the cultures are applied to an agar medium that contains the drug and to an agar medium that does not contain the drug, and strains that do not grow in the former medium but grow in the latter medium are selected. Thus, strains in which the second homologous recombination has taken place on the chromosomal DNA can be obtained. By determining the nucleotide sequence of a region of the chromosomal DNA in which the gene or DNA to be deleted was present, the introduction of deletion of the target gene or DNA on chromosomal DNA can be confirmed.

[0440] An example of a method utilizing homologous recombination, and thereby effectively introducing deletion, substitution or addition of nucleotide(s) into multiple genes, is a method involving the use of a linear DNA.

[0441] Specifically, a linear DNA that contains DNA fragments existing at both outside regions of a gene or DNA to be deleted on chromosomal DNA is corporated into a cell to cause homologous recombination between the chromosomal DNA and the introduced linear DNA. This method can be applied to any microorganisms, provided that such Escherichia coli effectively incorporate a linear DNA. Such microorganisms are preferably Escherichia coli that expresses λ phage-derived recombinant proteins (Red recombination system).

[0442] An example of Escherichia coli that expresses the λRed recombination system is Escherichia coli JM101 comprising pKD46, which is plasmid DNA having the gene of the λ Red recombination system (available from the E. coli Genetic Stock Center, Yale University, U.S.A.).

[0443] Examples of DNAs that can be used for homologous recombination include:
[0444] (a) a linear DNA comprising, at both ends of the drug-resistant gene, DNA existing at both outside regions of a chromosomal DNA into which the introduction of deletion, substitution or addition of nucleotide(s) is intended, or DNA homologous thereto;
[0445] (b) a linear DNA to which DNA existing at both outside regions of a chromosomal DNA into which the introduction of deletion, substitution or addition of nucleotide(s) is intended, or DNA homologous thereto is directly ligated;
[0446] (c) a linear DNA comprising, at both ends of DNA to which a drug-resistant gene and a gene that can be used for negative selection are ligated, DNA existing at both outside regions of chromosomal DNA into which the introduction of deletion, substitution or addition of nucleotide(s) is intended, or DNA homologous thereto; and
[0447] (d) a linear DNA according to (a), which further comprises a nucleotide sequence which is recognized by yeast-derived Flp recombinase [Proc. Natl. Acad. Sci., U.S.A., 82, 5875, 1985] between a drug-resistant gene and DNA existing at both outside regions of a chromosomal DNA or DNA homologous thereto.

[0448] Any drug-resistant genes can be used, provided that such genes impart drug resistance to a drug to which E. coli shows sensitivity. For example, kanamycin-resistant genes, chloramphenicol-resistant genes, gentamicin-resistant genes, spectinomycin-resistant genes, tetracycline-resistant genes, or ampicillin-resistant genes can be used as drug-resistant genes.

[0449] The genes that can be used for negative selection are genes that are lethal to E. coli under given culture conditions, when such genes are expressed in E. coli. Examples of such genes include sacB genes derived from the microorganism which belongs to the genus Bacillus [Appl. Environ. Microbiol., 59, 1361-1366, 1993] and rpsL genes derived from the microorganism which belongs to the genus Escherichia [Genomics, 72, 99-104, 2001].

[0450] DNA that exists at both ends of the aforementioned linear DNA which is located at both outside regions of a chromosomal DNA into which introduction of substitution or deletion of nucleotide(s) is intended, or DNA homologous thereto, is oriented on the linear DNA in the same direction as the direction thereof on the chromosomal DNA. The length thereof is preferably about 10 bp to 100 bp, more preferably about 20 bp to 50 bp, and further preferably about 30 bp to 40 bp.

[0451] The nucleotide sequence that is recognized by yeast-derived Flp recombinase may be a nucleotide sequence that is recognized by yeast-derived Flp recombinase and has a nucleotide sequence which catalyze homologous recombination, provided that the aforementioned protein recognizes such nucleotide sequence and catalyzes homologous recombination of such nucleotide sequence.

[0452] “A DNA homologous thereto” refers to a DNA which has identity to the extent that homologous recombination takes place between the aforementioned linear DNA and a target region on a chromosomal DNA. Specifically, it refers to 80% or more, preferably 90% or more, more preferably 95% or more, and further preferably 100% homology.

[0453] Homology of the nucleotide sequences can be determined using the aforementioned programs such as BLAST or FASTA.

[0454] The aforementioned linear DNA can be prepared by PCR. Also, DNA containing the linear DNA can be constructed on the plasmid and the linear DNA of interest can then be obtained by restriction enzyme treatment.

[0455] Deletion, substitution, or addition of nucleotide(s) can be introduced into chromosomal DNAs of E. coli by any of the following methods 1 to 4:
[0456] Method 1: a method wherein the linear DNA (a) or (d) is introduced into a host microorganism, and a transformant, into which such linear DNA has been integrated into a chromosomal DNA by homologous recombination, is selected using drug resistance as an indicator;

[0457] Method 2: a method wherein a DNA to which DNA existing at both outside regions of a chromosomal DNA into which the introduction of deletion, substitution or addition of nucleotide(s) is intended, or DNA homologous thereto is directly ligated, is introduced into the transformant obtained by the above method 1, and the drug-resistant gene integrated into chromosomal DNA by this method is deleted so as to substitute or delete a region on a chromosomal DNA of a microorganism;

Method 3:

[0458] [1] introducing the linear DNA (c) into a host microorganism and selecting a transformant into which the linear DNA has been integrated into chromosomal DNA by homologous recombination using drug resistance as an indicator,
[0459] [2] synthesizing a DNA obtained by ligating DNAs homologous to DNAs located at both outside regions of a target region of substitution or deletion on a chromosomal DNA in the same direction on the chromosomal DNA and introducing the synthesized product into the transformant obtained in [1] above, and
[0460] [3] culturing transformants subjected to the procedure [2] under conditions where the genes that can be used for negative selection are expressed, and selecting strains that can grow in the culture condition as strains in which the drug-resistant genes and genes that can be used for negative selection have been deleted from the chromosomal DNA; and
   Method 4:
[0461] [1] introducing the linear DNA (d) into a host microorganism and selecting a transformant into which the linear DNA has been integrated into chromosomal DNA by homologous recombination using drug resistance as an indicator, and
[0462] [2] introducing Flp recombinase gene-expressing plasmid into the transformant obtained in the above [1] to express the Flp recombinase gene, and obtaining strains sensitive to the drug used in the above[1].

[0463] A method of introducing a linear DNA into a host microorganism that is employed in the above methods can be any method as long as the DNA can be introduced into the microorganism. Examples thereof include a method involving the use of calcium ions [Proc. Natl. Acad. Sci., U.S.A., 69, 2110, 1972], the protoplast method [Japanese Published Unexamined Patent Application No. 2483942/88(1988)], and electroporation [Nucleic Acids Res., 16, 6127, 1988].

[0464] By using the DNA comprising at a site around the center thereof any gene to be inserted into a chromosomal DNA as the DNA that is used in method 2 or method 3 [2], drug-resistant genes or the like can be deleted, and any genes can be simultaneously introduced into the chromosomal DNA.

[0465] According to the methods 2 to 4, foreign genes, such as drug-resistant genes and genes that can be used for negative selection, do not remain in the chromosomal DNA of the transformant which is finally obtained. With the utilization of such methods, accordingly, the same drug-resistant genes and genes that can be used for negative selection may be used, and the procedures of such methods are repeated. This enables the easy production of E. coli having deletion of gene or DNA at two or more different regions on a chromosomal DNA.

[0466] The amounts of the E. coli mutant strains obtained by such method are greater than those of wild-type E. coli strains after a given period of culture. This can be confirmed by, for example, culturing the wild-type parental E. coli strains and the mutant strains using M9 minimal medium that contains 1% glucose, 0.6% disodium phosphate, 0.3% potassium dihydrogenphosphate, 0.05% sodium chloride, 0.1% ammonium chloride, 2 mmol/l of magnesium sulfate heptahydrate, 10 mg/l of iron sulfate and 100 μmol/l of calcium chloride, or LB liquid medium containing 3% glucose (10 g/l of Bacto tryptone (Difco), 5 g/l of Bacto yeast extract (Difco), 5 g/l of sodium chloride, and 1 ml/l of 1 mol/l sodium hydroxide), and assaying absorption of culture products at 660 nm or 590 nm at a given frequency, or assaying an ATP content per unit of medium via a conventional technique.

[0467] Also, the E. coli mutant strain of the present invention can be obtained by a method wherein a gene or DNA of chromosomal DNA of E. coli capable of producing a useful substance is deleted or a method wherein the capacity for producing a useful substance is imparted to E. coli from which a gene or DNA of chromosomal DNA has been deleted.

[0468] E. coli capable of producing a useful substance may be any E. coli, provided that it is capable of producing one or more types of useful substances. Examples of such E. coli include a strain isolated from nature that is capable of producing a useful substance, and E. coli to which the ability to produce a desirable useful substance has been artificially imparted by conventional methods.

[0469] Examples of such conventional methods include:
[0470] (a) a method for reducing or removing at least one mechanism for regulating biosynthesis of a useful substance;
[0471] (b) a method for increasing the expression level of at least one enzyme associated with biosynthesis of a useful substance;
[0472] (c) a method for increasing the copy number of at least one enzyme gene associated with biosynthesis of a useful substance;
[0473] (d) a method for attenuating or blocking at least one metabolic pathway which branches from a biosynthetic pathway of a useful substance into metabolites other than the useful substance; and
[0474] (e) a method for selecting a strain that exhibits higher resistance to an analogue of a useful substance than a wild-type strain.
[0475] Such conventional methods can be carried out alone or in combinations of two or more.

[0476] When useful substances are amino acids, for example, method (a) is described in Agric. Biol. Chem., 43, 105-111, 1979, J. Bacteriol., 110, 761-763, 1972, and Appl. Microbiol. Biotechnol., 39, 318-323, 1993; method (b) is described in Agric. Biol. Chem., 43, 105-111, 1979 and J. Bacteriol., 110, 761-763, 1972; method (c) is described in Appl. Microbiol. Biotechnol., 39, 318-323, 1993 and Agric. Biol. Chem., 39, 371-377, 1987; method (d) is described in Appl. Environ. Microbiol., 38, 181-190, 1979 and Agric. Biol. Chem., 42, 1773-1778, 1978; and method (e) is described in Agric. Biol. Chem., 36, 1675-1684, 1972, Agric. Biol. Chem., 41, 109-116, 1977, Agric. Biol. Chem., 37, 2013-2023, 1973, and Agric. Biol. Chem., 51, 2089-2094, 1987. With reference to these literatures, microorganisms capable of forming and accumulating various amino acids can be produced.

[0477] Also, many examples of a method for producing microorganisms capable of forming and accumulating amino acids by any of or two or more of methods (a) to (e) above are described in Biotechnology 2nd ed., vol. 6, Products of Primary Metabolism (VCH Verlagsgesellschaft mbH, Weinheim, 1996), section 14a or 14b, Advances in Biochemical Engineering/Biotechnology 79, 1-35, 2003, or Amino san Hakko (Amino acid fermentation), Japan Scientific Societies Press, Hiroshi Aida et al. (1986). In addition, many reports have been made concerning a specific method for producing microorganisms capable of forming and accumulating amino acids. Examples thereof include Japanese Published Unexamined Patent Application No. 2003-164297, Agric. Biol. Chem., 39, 153-160, 1975, Agric. Biol. Chem., 39, 1149-1153, 1975, Japanese Published Unexamined Patent Application No. 13599/83(1983), J. Gen. Appl. Microbiol., 4, 272-283, 1958, Japanese Published Unexamined Patent Application No. 94985/88(1988), Agric. Biol. Chem., 37, 2013-2023, 1973, WO 97/15673, Japanese Published Unexamined Patent Application No. 18596/81(1981), Japanese Published Unexamined Patent Application No. 144092/81(1981), and Japanese Published Unexamined Patent Application No. 2003-511086. With reference to these literatures, microorganisms capable of producing one or more kinds of amino acids can be produced. Also, E. coli capable of producing other useful substance can be produced by increase of biosynthetase of said useful substance, and improvement of biosynthesis reguratory mechanism, elimination mechanism and the like in the same way as in the production of E. coli mutant strain capable of producing an amino acid.

[0478] 3. Method for Producing Useful Substances of the Present Invention

[0479] The present invention relates to a method for producing useful substances comprising culturing the E. coli mutant strain of the present invention in a medium so as to generate and accumulate such useful substances in the culture and recovering the useful substances from the culture.

[0480] Useful substances are not particularly limited, provided that such substances can be produced with the use of the E. coli mutant strain of the present invention. Examples thereof include proteins, peptides, amino acids, nucleic acids, vitamins, saccharides, organic acids, and lipids. Examples of proteins include inosine kinase, glutamate 5-kinase (EC 2.7.2.11), glutamate-5-semialdehyde dehydrogenase (EC 1.2.1.41), pyrroline-5-carboxylate reductase (EC 1.5.1.2), and human granulocyte-colony-stimulating factors. An example of peptide is glutathione. Examples of amino acids include L-alanine, glycine, L-glutamine, L-glutamic acid, L-asparagine, L-aspartic acid, L-lysine, L-methionine, L-threonine, L-leucine, L-valine, L-isoleucine, L-proline, L-histidine, L-arginine, L-tyrosine, L-tryptophane, L-phenylalanine, L-serine, L-cysteine, L-3-hydroxyproline, and L-4-hydroxyproline. Examples of nucleic acids include inosine, guanosine, inosinic acid, and guanylic acid. Examples of vitamins include riboflavin, thiamine, and ascorbic acid. Examples of saccharides include xylose and xylitol. Examples of lipids include eicosapentaenoic acid (EPA) and docosahexaenoic acid (DHA).

[0481] The E. coli mutant strain that is used for the production method of the present invention can be cultured in accordance with a conventional technique as described below.

[0482] A medium for culturing E. coli mutant strain which is used for the production method of the present invention may be natural or synthetic medium as long as it contains carbon sources, nitrogen sources, inorganic salts, etc. assimilable by the microorganisms and the microorganisms can be efficiently cultured therein.

[0483] Any carbon sources assimilable by the microorganisms can be used. Examples thereof include: carbohydrates such as glucose, fructose, sucrose, molasses containing any of such substances, starch, and starch hydrolysate; organic acids such as acetic acid and propionic acid; and alcohols such as ethanol and propanol.

[0484] Examples of nitrogen sources include: ammonia; ammonium salts of inorganic or organic acids such as ammonium chloride, ammonium sulfate, ammonium acetate, and ammonium phosphate; peptone; meat extract; yeast extract; corn steep liquor; casein hydrolysate; soybean cake and hydrolysate of soybean cake; and various fermentation microorganisms and digests thereof.

[0485] Examples of inorganic salts include: monopotassium phosphate, dipotassium phosphate, magnesium phosphate, magnesium sulfate, sodium chloride, iron(I) sulfate, manganese sulfate, copper sulfate, and calcium carbonate.

[0486] Culturing is carried out under aerobic conditions such as shaking culture or submerged aeration agitation culture. Culturing temperature is preferably 15 to 40° C., and culture time is generally 16 hours to 7 days. During culturing, the pH is preferably maintained at 3.0 to 9.0. The pH is adjusted with an inorganic or organic acid, an alkali solution, urea, calcium carbonate, ammonia, or the like.

[0487] When useful substances are generated and accumulated extracellularly, precipitates such as cells are removed from the culture after the completion of culturing, and target useful substances can be isolated and purified from the culture via ion-exchange treatment, concentration, salting out, or other means. Such techniques can be employed in combination.

[0488] When useful substances are generated and accumulated intracellularly, cells are recovered from the culture after the completion of culturing and then disrupted via adequate means such as mechanical or chemical means. Target useful substances can be isolated and purified from the solution of disrupted cells via ion-exchange treatment, concentration, salting out, or other means, and such techniques can be employed in combination.

### EXAMPLE 1

### Construction of Mutant Library of E. coli that Partially lacks Chromosomal DNA

[0489] (1) Preparation of E. coli Capable of Homologous Recombination with Linear DNA on Chromosomal DNA

[0490] The P1 phages were prepared from E. coli KM22 strains (Gene, 246, 321-330, 2000) capable of homologous recombination with linear DNA on chromosomal DNA in the following manner.

[0491] The E. coli KM 22 strains were cultured in LB liquid medium containing 20 mg/l of kanamycin (10 g/l of Bacto tryptone (Difco), 5 g/l of Bacto yeast extract (Difco), 5 g/l of sodium chloride, and 1 ml/l of 1 mol/l sodium hydroxide) at 30° C. overnight. Thereafter, 0.5 ml of culture solution, 1.4 ml of fresh LB liquid medium, and 100 μl of 0.1 mol/l calcium chloride solution were mixed.

[0492] The resulting mixture was subjected to shaking culture at 30° C. for 5 to 6 hours, and 400 μl of the mixture was transferred to a sterilized tube. A P1 phage stock solution (2 μl) was added thereto, the mixture was incubated at 37° C. for 10 minutes, 3 ml of a soft agar solution maintained at 50° C. (10 g/l of Bacto tryptone, 5 g/l of Bacto yeast extract, 5 mmol/l of calcium chloride, 1 ml/l of 1 mol/l sodium hydroxide, and 3 g/l of agar) was added thereto, the resultant was thoroughly agitated, and the resultant was then applied onto a Ca-LB agar medium plate (10 g/l of Bacto tryptone, 5 g/l of Bacto yeast extract, 5 mmol/l of calcium chloride, 1 ml/l of 1 mol/l sodium hydroxide, and 15 g/l of agar; plate diameter: 15 cm).

[0493] The plate was subjected to culture at 37° C. for 7 hours, the soft agar portion was finely ground using a spreader and recovered, and the resultant was centrifuged at 1,500 g at 4° C. for 10 minutes. Chloroform (100 μl) was added to 1.5 ml of the supernatant, and the mixture was stored at 4° C. overnight. On the following day, the solution was centrifuged at 15,000 g for 2 minutes, and the supernatant was stored at 4° C. as a phage stock.

[0494] Subsequently, the obtained phage was used to transform the E. coli W3110 strain. The culture solution (200 μl) of the E. coli W3 110 strains that had been cultured in Ca-LB liquid medium at 30° C. for 4 hours was fractionated, and 1 μl of phage stock was added. The mixture was incubated at 37° C. for 10 minutes, 5 ml of LB liquid medium and 200 μl of 1 mol/l sodium citrate solution were added, and the mixture was agitated. The resultant was centrifuged at 1,500 g at 25° C. for 10 minutes, the supernatant was discarded, 1 ml of LB liquid medium and 10 μl of 1 mol/l sodium citrate solution were added to the precipitated cells, and the resultant was incubated at 30° C. for 2 hours. The solution (100 μl) was applied to an agar plate medium, Antibiotic Medium 3, containing 20 mg/l of kanamycin, and the plate was subjected to culture at 30° C. overnight. Several colonies that had appeared were applied to an agar plate medium, Antibiotic Medium 3, containing 20 mg/l kanamycin (0.15% meat extract, 0.15% yeast extract, 0.5% peptone, 0.1% glucose, 0.35% sodium chloride, 0.132% dibasic potassium phosphate, and 1.5% agar; pH 7), the drug sensitivity thereof was inspected, and kanamycin-resistant strains were selected. Thus, E. coli W3110red strains into which a chromosomal DNA region (Δ(recC ptr recB recD)::Plac-red kan) capable of homologous recombination with linear DNA on chromosomal DNA had been transduced were obtained.

[0495] (2) Construction of Mutant Library of E. coli that Lacks Part of Chromosomal DNA

[0496] (i) Preparation of Competent Cells

[0497] The E. coli W3110red strains obtained in (1) above were cultured at 30° C. until the OD at 660 nm reached 0.1 using 100 ml of LB liquid medium comprising 1 mmol/l of isopropyl-thio-β-D-galactopyranoside (IPTG). The following procedure was carried out at 4° C. or with the use of an ice-cooled solution.

[0498] The obtained culture was centrifuged, and the precipitated cells were suspended in 50 ml of a 20% glycerol solution. The glycerol solution was centrifuged, the precipitated cells were resuspended in a 20% glycerol solution, such procedure was repeated 3 or more times to wash the cells, and the cells were then suspended in 50 μl of a 10% glycerol solution. Thus, a solution of competent cells for electroporation was obtained.

[0499] (ii) Preparation of DNA Fragment used for Introducing Deletions into Chromosomal DNA

[0500] A DNA fragment used for introducing deletions of about 46 kbp DNA having a nucleotide sequence comprising nucleotides 4489585 to 4535472 of the nucleotide sequence as shown in SEQ ID NO: 1 into chromosomal DNA was produced in the following manner.

[0501] DNA having the nucleotide sequence as shown in SEQ ID NO: 2 (DNA comprising a nucleotide sequence comprising nucleotides 4487585 to 4487605 of the nucleotide sequence as shown in SEQ ID NO: 1; hereafter referred to as “primer A”), DNA having the nucleotide sequence as shown in SEQ ID NO: 3 (DNA comprising a nucleotide sequence comprising at the 3′ side of a 25-mer linker sequence a nucleotide sequence comprising nucleotides 4489584 to 4489561 of the nucleotide sequence as shown in SEQ ID NO:1; hereafter referred to as “primer B”), DNA having the nucleotide sequence as shown in SEQ ID NO: 4 (DNA comprising a nucleotide sequence comprising nucleotides 4537475 to 4537451 of the nucleotide sequence as shown in SEQ ID NO: 1; hereafter referred to as “primer C”), and DNA having the nucleotide sequence as shown in SEQ ID NO: 5 (DNA comprising a nucleotide sequence comprising at the 3′ side of a 22-mer linker sequence a nucleotide sequence comprising nucleotides 4535473 to 4535496 of the nucleotide sequence as shown in SEQ ID NO: 1; hereafter referred to as “primer D”) were synthesized.

[0502] PCR was carried out using, as a template, chromosomal DNA of the E. coli W3110red strain and, as primer sets, a pair of primer A and primer B and a pair of primer C and primer D. PCR was carried out using LA-Taq (Takara Bio Inc.), and a reaction solution was prepared in accordance with the instructions included therein. Purified chromosomal DNA (100 ng) or small amounts of E. coli W3110red strains recovered with the use of a tip of a pick and 20 pmol of each primer DNA were added to the reaction solution, and PCR was then carried out. PCR was carried out by incubating at 94° C. for 3 minutes, repeating a cycle of 94° C. for 15 seconds, 55° C. for 20 seconds, and 68° C. for 1 minute and 30 seconds 30 times, and then incubating at 72° C. for 10 minutes.

[0503] The PCR-amplified DNA fragments were purified using a PCR Purification Kit (Qiagen) and dissolved in 50 μl of water. The DNA fragments were confirmed to be 1-kb DNA fragments homologous to nucleotide sequences at both ends of the target regions for deletion on chromosomal DNA. Hereafter, the DNA fragment amplified with the use of the pair of primer A and primer B is referred to as an upstream arm, and the DNA fragment amplified with the use of the pair of primer C and primer D is referred to as a downstream arm.

[0504] Subsequently, PCR was carried out using, as a template, chromosomal DNA of the Bacillus subtilis 168 strain (ATCC23857) and, as a primer set, DNA having the nucleotide sequence as shown in SEQ ID NO: 6 and DNA having the nucleotide sequence as shown in SEQ ID NO: 7. PCR was carried out with the use of a reaction solution of the same composition as above under the same reaction conditions, except for the use of template DNA and primer DNA of different types.

[0505] The PCR-amplified DNA fragments were purified in the same manner as described above and then dissolved in 50 Al of water. Such DNA fragments were confirmed to be sacB genes (Genbank accession no. X02730) derived from Bacillus subtilis that can be used for negative selection.

[0506] Subsequently, PCR was carried out using, as a template, a pHSG399 plasmid DNA (Takara Bio Inc.) and, as a primer set, DNA having the nucleotide sequence as shown in SEQ ID NO: 8 and DNA having the nucleotide sequence as shown in SEQ ID NO: 9. PCR was carried out with the use of a reaction solution of the same composition as above under the same reaction conditions, except for the use of template DNA and primer DNA of different types.

[0507] The PCR-amplified DNA fragments were separated by agarose gel electrophoresis, purified using the QIA quick Gel Extraction Kit (Qiagen), and dissolved in 50 μl of water. The DNA fragments were confirmed to comprise chloramphenicol-resistant genes (cat genes).

[0508] Subsequently, PCR was carried out using as templates the DNA fragment comprising the sacB gene and the DNA fragment comprising the cat gene obtained above and, as a primer set, DNA having the nucleotide sequence as shown in SEQ ID NO: 10 and DNA having the nucleotide sequence as shown in SEQ ID NO: 11. PCR was carried out with the use of a reaction solution of the same composition as above under the same reaction conditions, except for the use of template DNA and primer DNA of different types.

[0509] The PCR-amplified DNA fragments were separated by agarose gel electrophoresis, purified using the QIA quick Gel Extraction Kit, and dissolved in 50 μl of water. The DNA fragments were confirmed to comprise the sacB gene and the cat gene ligated in the same direction.

[0510] Subsequently, PCR was carried out using, as template DNA, a mixture of 3 DNA fragments, i.e., the upstream arm, the downstream arm, and the DNA fragment comprising the sacB gene and the cat gene ligated thereto obtained above and, as a primer set, DNA having the nucleotide sequence as shown in SEQ ID NO: 12 (DNA comprising a nucleotide sequence comprising nucleotides 4488585 to 4488610 of the nucleotide sequence as shown in SEQ ID NO: 1) and DNA having the nucleotide sequence as shown in SEQ ID NO: 13 (DNA comprising a nucleotide sequence comprising nucleotides 4536475 to 4536451 of the nucleotide sequence as shown in SEQ ID NO: 1). PCR was carried out with the use of a reaction solution of the same composition as above under the same reaction conditions, except for the use of, as template DNA, 1 μl of a solution of upstream arm DNA, 1 μl of a solution of downstream arm DNA, and 1.5 μl of a DNA fragment comprising the sacB gene and the cat gene ligated thereto and, as a primer set, DNA having the nucleotide sequence as shown in SEQ ID NO: 12 and DNA having the nucleotide sequence as shown in SEQ ID NO: 13.

[0511] The PCR-amplified DNA fragments were separated by agarose gel electrophoresis, purified using the QIA quick Gel Extraction Kit, and dissolved in 50 μl of water. The DNA fragments were confirmed to comprise DNA fragments homologous to both ends of the target region of deletion added to both ends of DNA to which the sacB gene and the cat gene have been ligated (hereafter referred to as a “DNA fragment for regional deletion”).

[0512] (iii) Preparation of Mutant Strain of E. coli that Lacks Part of Chromosomal DNA

[0513] The DNA fragment for regional deletion obtained above (0.1 μg) was added to 50 μl of a solution of E. coli 3110red competent cells obtained above, and electroporation was carried out using 0.1 cm cuvette (BioRad) at 1.8 kV and 25 μF. The transformants wherein the DNA fragment for regional deletion incorporated into the chromosomes of the E. coli W3110red strain were selected on an LBcm plate (10 g/l of Bacto tryptone (Difco), 5 g/l of Bacto yeast extract (Difco), 20 mg/l of kanamycin, 15 mg/l of chloramphenicol, and 1 ml/l of 1 mol/l NaOH). The colonies of the selected transformants were replicated on an suLB agar medium plate (10 g/l of Bacto tryptone (Difco), 5 g/l of Bacto yeast extract (Difco), 10% of sucrose, 20 mg/l of kanamycin, 15 mg/l of chloramphenicol, and 1 ml/l of 1 moill NaOH) to select strains exhibiting sucrose sensitivity.

[0514] A nucleotide sequence comprising nucleotides 4489585 to 4535472 of the nucleotide sequence as shown in SEQ ID NO: 1, which is a target region for deletion on chromosomal DNA of the selected strain, had been substituted with DNA comprising the sacB gene and the cat gene ligated thereto. This substitution was confirmed in the following manner.

[0515] PCR was carried out using, as a primer set, DNA comprising the nucleotide sequence as shown in SEQ ID NO: 2 (primer A), which has homologous nucleotide sequences in regions 1 kb upstream and downstream of the ends of the arm sequence of linear DNA used for transformation and DNA comprising the nucleotide sequence as shown in SEQ ID NO: 4 (primer C) and, as a template, chromosomal DNA of the strain selected above. PCR was carried out with the use of a reaction solution of the same composition as above under the same reaction conditions, except for the use of, as a template, small amounts of cell strains selected above (collected from the colonies with the tip of a pick) and, as a primer set, DNA having the nucleotide sequence as shown in SEQ ID NO: 3 and DNA having the nucleotide sequence as shown in SEQ ID NO: 5.

[0516] Through the above PCR procedure, a DNA fragment of about 6.7 kb was amplified. A DNA fragment prepared by adding DNA of about 2 kb to both ends of a DNA fragment (2.7 kb) comprising the sacB gene and the cat gene ligated thereto is of about 6.7 kb. Accordingly, a transformant, which was an amplified fragment of about 6.7 kb, obtained via PCR involving the use of a primer set comprising primer A and primer C, was the transformant of interest. Thus, such transformant was designated as the ΔE_suc strain (a deleted region of 4489585 to 4535472 bp).

[0517] (iv) Preparation of Mutant Strain of E. coli that Lacks a Partial Region of Chromosomal DNA

[0518] Mutants that lack various regions of chromosomal DNAs of E. coli W3110red strains were prepared in the same manner used in the case of preparing the ΔE_suc strains.

[0519] A DNA fragment comprising the cat gene and the sucB gene ligated thereto was eliminated from the ΔE_suc strain to prepare an E. coli mutant strain in the following manner. DNA comprising the nucleotide sequence as shown in SEQ ID NO: 14 (DNA comprising a nucleotide sequence to which nucleotides 4535496 to 4535476 and nucleotides 4489584 to 4489561 of the nucleotide sequence as shown in SEQ ID NO: 1 have been ligated; hereafter referred to as “primer E”) and DNA comprising the nucleotide sequence as shown in SEQ ID NO: 15 (DNA comprising a nucleotide sequence to which nucleotides 4489561 to 4489584 and nucleotides 4535476 to 4535496 of the nucleotide sequence as shown in SEQ ID NO: 1 have been ligated; hereafter referred to as “primer F”) were synthesized. PCR was carried out using, as a template, chromosomal DNA of the E. coli W3110 strain and, as primer sets, a pair of primer A and primer E and a pair of primer C and primer F. PCR was carried out with the use of a reaction solution of the same composition as above under the same reaction conditions, except for the use of a template and primer sets of different types.

[0520] The PCR-amplified DNA fragments were purified using a PCR Purification Kit and dissolved in 50 μl of water. The DNA fragments were confirmed to comprise 2-kb nucleotide sequences homologous to the nucleotide sequences of chromosomal DNA at both ends of the target region for deletion. Hereafter, the DNA fragment amplified with the use of the pair of primer A and primer E is referred to as an upstream arm and the DNA fragment amplified with the use of the pair of primer C and primer F is referred to as a downstream arm.

[0521] Subsequently, PCR was carried out using, as a template, a mixture of the upstream arm and the downstream arm obtained above and, as a primer set, DNA comprising the nucleotide sequence as shown in SEQ ID NO: 12 and DNA comprising the nucleotide sequence as shown in SEQ ID NO: 13. PCR was carried out with the use of a reaction solution of the same composition as above under the same reaction conditions, except for the use of, as templates, 1 μl of a solution of the upstream arm DNA and 1 μl of a solution of the downstream arm DNA obtained above and, as a primer set, DNA comprising the nucleotide sequence as shown in SEQ ID NO: 12 and DNA comprising the nucleotide sequence as shown in SEQ ID NO: 13.

[0522] The PCR-amplified DNA fragments were separated by agarose gel electrophoresis, purified using the QIA quick Gel Extraction Kit, and dissolved in 50 μl of water. It was confirmed that a DNA fragment that is an amplification product of a 2-kb fragment comprising a 1-kb fragment in the deleted region of the both arms was obtained (hereafter referred to as a “DNA fragment for deleting the sacB-cat gene”).

[0523] In accordance with the method of (2) (i) above, a solution of ΔE_suc competent cells was prepared, the DNA fragment for gene deletion was added thereto, and such DNA fragment was introduced into the ΔE_suc cell via electroporation. SuLB agar medium was used as a selection medium. The colonies of the selected transformants were replicated on an LBcm agar plate to select strains exhibiting chloramphenicol sensitivity.

[0524] Subsequently, PCR was carried out using, as a template, chromosomal DNA of the sucrose-resistant and chloramphenicol-sensitive strain selected above and, as primer set, the pair of primer A and primer C. PCR was carried out with the use of a reaction solution of the same composition as above under the same reaction conditions, except for the use of template DNA and primer DNA of different types.

[0525] Through the above PCR procedure, an amplified fragment of about 4.0 kb was obtained. An amplified DNA fragment is obtained via PCR using, as a template, chromosomal DNA of the sucrose-resistant and chloramphenicol-sensitive strain into which substitution of interest has been introduced and from which the suc gene and the cat gene have been deleted. Since a region comprising an upstream 2-kbp region and a downstream 2-kbp region adjacent to the deleted region is amplified from such DNA fragment, a band of about 4 kb is amplified. Accordingly, it was confirmed that a partially deleted strain (the ΔE strain) of chromosomal DNA that lacks a specific region on chromosomal DNA so as not to leave the marker gene behind was prepared by the above method.

[0526] (v) Preparation of Mutant Library of E. coli that Lacks Part of Chromosomal DNA

[0527] DNA that can be designed based on nucleotide sequences located at both ends of a target region of deletion on chromosomal DNA was used instead of the primers A to D above to prepare a mutant strain of E. coli that lacks an arbitrary region on chromosomal DNA of the E. coli W3110red strain in the same manner as described above.

### EXAMPLE 2

### Growth Test using Minimal Medium

[0528] Various mutant strains obtained in Example 1 were applied to an LB agar medium (which is a plate prepared with the addition of 15 g/l of agar to LB medium) and culture was conducted at 37° C. overnight to obtain cell strains. Small amounts of such strains were introduced into 5 ml of LB medium containing 50 mg/l of kanamycin and culturing was carried out overnight to obtain culture products. The culture products (50 μl) were inoculated into 5 ml of M9 minimal medium that contained 1% glucose and 10 mg/l of iron sulfate, shaking culture was conducted at 37° C., and turbidity 0, 6, 10, 13, 16, 19, and 32 hours after the initiation of culture was measured based on absorption at 660 nm. Growth of the above mutants and that of their parental strains, E. coli W3110red strains, were compared, and mutants exhibiting growth curves substantially the same as those of the parental strains were selected.

[0529] The deleted regions of chromosomal DNA of the selected mutants and genes included in such regions are shown in Table 2.

TABLE 2

| Name of | |
|---|---|
| deleted | |
| region | Genes contained in deleted region |
| Δ101B | JW0020(insB), JW0021(insA) |
| Δ102 | JW0065(yabJ), JW0066(yabK), JW0067(tbpA), JW0068(yabN) |
| Δ103 | JW0146(fhuA), JW0147(fhuC), JW0148(fhuD), JW0149(fhuB) |
| Δ001 | JW0213(yafJ), JW0214(yafK), JW0215(yafQ), JW0216(dinJ), JW0217(yafL), |
| | JW0218(yafM), JW0219(fhiA), JW0220(lafU), JW0221(dinP), JW0222(yafN), |
| | JW0223(yafO), JW0224(yafP), JW0225(127#12), JW0226(prfH) |
| Δ002 | JW0234(ykfI), JW0235(yafW), JW0235.5(yeeT), JW0236(ykfG), JW0237(yafX), |
| | JW0238(ykfF), JW0239(ykfB), JW0240(yafY), JW0241(ypjK), JW0242(yafZ), |
| | JW0243(ykfA), JW0244(perR), JW0245(129#3.1), JW0246(129#3.2), JW0247(129#5), |
| | JW0248(ykfC), JW0249(130#0.1), JW0250(is5B), JW0251(yi51), JW0252(mmuP), |
| | JW0253(mmuM), JW0254(afuC), JW0255(130#4), JW0256(insB), JW0257(insA), |
| | JW0258(130#5), JW0259(yagB), JW0260(yagA), JW0261(yagE), JW0262(yagF), |
| | JW0263(yagG), JW0264(yagH), JW0265(yagI), JW0266(argF), JW0267(yfjI), |
| | JW0268(insB), JW0269(insA), JW0270(yagJ), JW0271(yagK), JW0272(yagL), |
| | JW0273(yagM), JW0274(yagN), JW0275(intF), JW0276(yagP), JW0277(yagQ), |
| | JW0278(yagR), JW0279(yagS), JW0280(yagT), JW0281(yagU), JW0282(ykgJ), |
| | JW0283(yagV), JW0284(yagW), JW0285(yagX), JW0286(yagY), JW0287(yagZ), |
| | JW0288(ykgK), JW0289(ykgL), JW0290(ykgM), JW0291(eaeH), JW0292(134#4.1), |
| | JW0293(134#4.2), JW0294(ykgA), JW0295(ykgB), JW0296(ykgI), JW0297(merA), |
| | JW0298(ykgD), JW0299(ykgE), JW0300(ykgF), JW0301(ykgG), JW0302(ykgH), |
| | JW0303(betA), JW0304(betB), JW0305(betI), JW0306(betT), JW0307(yahA), |
| | JW0308(yahB), JW0309(yahC), JW0310(yahD), JW0311(yahE), JW0312(yahF), |
| | JW0313(yahG), JW0314(yahH), JW0315(arcM), JW0316(yahJ), JW0317(yahK), |
| | JW0318(yahL), JW0319(yahM), JW0320(yahN), JW0321(yahO), JW0322(prpR), |
| | JW0323(bcpA), JW0324(prpC), JW0325(prpD), JW0326(prpE), JW0327(codB), |
| | JW0328(codA), JW0329(cynR), JW0330(cynT), JW0331(cynS), JW0332(cynX), |
| | JW0333(lacA), JW0334(lacY), JW0335(lacZ), JW0336(lacI), JW0337(mhpR), |
| | JW0338(mhpA), JW0339(mhpB), JW0340(mhpC), JW0341(mhpD), JW0342(mhpF), |
| | JW0343(mhpE), JW0344(mhpT), JW0345(yaiL), JW0346(yaiM), JW0347(adhC), |
| | JW0348(yaiN), JW0349(yaiO), JW0350(140#9), JW0351(yi2A), JW0352(yi22), |
| | JW0353(yi24), JW0354(yi23), JW0355(yaiP), JW0356(yaiS), JW0357(tauA), |
| | JW0358(tauB), JW0359(tauC), JW0360(ssiD) |
| Δ007 | JW0362(yaiT), JW0363(141#3.1), JW0364(141#3.2), JW0365(yaiU), JW0366(yaiV), |
| | JW0367(ampH), JW0368(sbmA), JW0369(yaiW), JW0370(yaiY), JW0371(yaiZ), |
| | JW0372(ddlA), JW0373(yaiB), JW0374(phoA), JW0375(psiF), JW0376(yaiC) |
| Δ009B | JW0482(ybbO), JW0483(tesA), JW0484(ybbA), JW0485(ybbP), JW0486(rhsD), |
| | JW0487(ybbC), JW0488(rhsE), JW0489(ybbD), JW0490(156#1), JW0491(ybbB), |
| | JW0492(ybbS), JW0493(ybbT), JW0494(ybbU) |
| Δ010 | JW0497(ybbQ), JW0498(ybbV), JW0499(allP), JW0500(allA), JW0501(ybbY), |
| | JW0502(ybbZ), JW0503(ylbA), JW0504(allC), JW0505(ylbC), JW0506(fdrA), |
| | JW0507(ylbE), JW0508(ylbE), JW0509(ylbF), JW0510(arcC), |
| Δ011 | JW0525(intD), JW0526(EXO_LAMBD), JW0527(VRPP_LAMBD), JW0528(159#4), |
| | JW0529(159#5), JW0530(VREN_LAMBD), JW0531(emrE), JW0532(ybcK), |
| | JW0533(ybcL), JW0534(ybcM), JW0535(ybcN), JW0536(ninE), JW0537(ybcO), |
| | JW0538(rus), JW0539(ybcQ), JW0539.5(160#10), JW0540(is5B), JW0541(yi51), |
| | JW0542(nmpC), JW0543(vlyS), JW0544(ybcS), JW0545(ybcT), JW0546(vboR), |
| | JW0547(ybcV), JW0548(ybcW), JW0549(nohB), JW0550(ybcX), JW0551(ybcY), |
| | JW0552(161#0.2), JW0553(appY), JW0554(ompT), JW0555(envY), JW0556(ybcH), |
| | JW0557(nfrA), JW0558(nfrB), JW0559(cusS), JW0560(cusR), JW0561(cusC), |
| | JW0562(ylcC), JW0563(cusB), JW0564(cusA), JW0565(pheP), JW0566(ybdG), |
| | JW0567(nfnB), JW0568(ybdF), JW0569(ybdJ), JW0570(ybdK), JW0571(hokE), |
| | JW0572(yi81), JW0573(yi82) |
| Δ012 | JW0638(ybeL), JW0639(ybeQ), JW0640(ybeR), JW0641(ybeS), JW0642(ybeT), |
| | JW0643(ybeU), JW0644(ybeV), JW0645(ybeW), JW0646(ybeK), JW0647(gltL), |
| | JW0648(gltK), JW0649(gltJ), JW0650(ybeJ), JW0651(171#0.1), JW0652(is5B), |
| | JW0653(yi51) |
| Δ013B | JW0681(ybfK), JW0682(kdpE), JW0683(kdpD), JW0684(kdpC), JW0685(kdpB), |
| | JW0686(kdpA), JW0687(kdpF), JW0688(ybfA), JW0689(rhsC), JW0690(174#4.1), |
| | JW0691(ybfB), JW0692(rhsA), JW0693(ybfC), JW0694(ybfD), JW0695(ybfL), |
| | JW0696(ybfD), JW0697(ybgA) |
| Δ013 | JW0687(kdpF), JW0688(ybfA), JW0689(rhsC), JW0690(174#4.1), JW0691(ybfB), |
| | JW0692(rhsA), JW0693(ybfC), JW0694(ybfD), JW0695(ybfL), JW0696(ybfD), |
| | JW0697(ybgA) |
| Δ104 | JW0743(modF), JW0744(modE), JW0745(180#2), JW0746(modA), JW0747(modB), |
| | JW0748(modC) |
| Δ014 | JW0782(204#3.1), JW0783(ybiA), JW0784(dinG), JW0785(ybiB), JW0786(ybiC), |
| | JW0787(ybiJ), JW0788(ybiI), JW0789(ybiX), JW0790(ybiL), JW0791(ybiM), |
| | JW0792(ybiN), JW0793(ybiO), JW0794(glnQ), JW0795(glnP), JW0796(glnH) |
| Δ015 | JW0813(yliA), JW0814(yliB), JW0815(yliC), JW0816(yliD), JW0817(209#3), |
| | JW0818(209#4), JW0819(yliG), JW0820(yliH), JW0821(yliI), JW0822(yliJ), |
| | JW0823(dacC), JW0824(deoR), JW0825(ybjG) |
| Δ016 | JW0834(ybjC), JW0835(mdaA), JW0836(rimK), JW0837(ybjN), JW0838(potF), |
| | JW0839(potG), JW0840(potH), JW0841(potI), JW0842(ybjO), JW0843(ybjF), |
| | JW0844(artJ), JW0845(artM), JW0846(artQ), JW0847(artI), JW0848(artP), |
| | JW0849(ybjP), JW0850(211#9), JW0851(211#10), JW0852(211#11), JW0853(ybjT), |
| | JW0854(ltaA) |
| Δ017C | JW0916(ssuB), JW0917(ssuC), JW0918(ssuD), JW0919(ssuA) |
| Δ018 | JW0969(ymcC), JW0970(ymcD), JW0971(insA), JW0972(insB), JW0973(cspH), |
| | JW0974(cspG), JW0975(sfa), JW0976(yccL), JW0977(yccM), JW0978(torS), |
| | JW0979(torT), JW0980(torR), JW0981(torC), JW0982(torA), JW0983(torD), |
| | JW0984(yccD), JW0985(cbpA), JW0986(yccE), JW0987(agp), JW0988(yccJ), |
| | JW0989(wrbA), JW0990(yciG), JW0991(ycdG), JW0992(228#5), JW0993(228#6), |
| | JW0994(228#7), JW0995(ycdK), JW0996(228#9), JW0997(228#10), JW0998(ycdC), |
| | JW0999(putA), JW1000(yzpU), JW1001(putP), JW1002(229#1), JW1003(ycdO), |
| | JW1004(ycdB), JW1005(phoH), JW1006(ycdP), JW1007(ycdQ), JW1008(ycdR), |
| | JW1009(ycdR), JW1010(ycdS), JW1011(ycdT), JW1012(230#3), JW1013(230#3.1), |
| | JW1014(230#4), JW1015(ycdU) |
| Δ090 | JW1105(ycfX), JW1106(238#9), JW1107(cobB), JW1108(ymfA), JW1109(potD), |
| | JW1110(potC), JW1111(potB), JW1112(potA), JW1113(pepT), JW1114(ycfD), |
| | JW1115(phoQ), JW1116(phoP) |
| Δ019 | JW1123(ymfD), JW1124(ymfE), JW1125(lit), JW1126(intE), JW1127(VXIS_BPP21), |
| | JW1128(ymfH), JW1129(ymfI), JW1130(ymfJ), JW1131(RPC2_BPP22), |
| | JW1132(241#2), JW1133(ymfL), JW1134(ymfM), JW1135(ymfN), JW1136(ymfR), |
| | JW1137(ymfO), JW1138(241#8), JW1139(241#9), JW1140(ycfK), JW1141(ymfS), |
| | JW1142(ycfA), JW1143(ycfE), JW1144(pin), JW1145(mcrA), JW1146(241#16), |
| | JW1147(ycgW), JW1148(ycgX), JW1149(ycgE), JW1150(242#1), JW1151(ycgZ), |
| | JW1152(ymgA), JW1153(242#1.4), JW1154(ymgC), JW1155(yahA), JW1156(243#0.1), |
| | JW1157(243#1), JW1158(aidA), JW1159(ymgD), JW1160(243#4), JW1161(243#5), |
| | JW1162(243#5.1) |
| Δ020C | JW1166(ycgJ), JW1167(ycgK), JW1168(ycgL), JW1169(243#12), JW1170(ycgN), |
| | JW1171(clyA) |
| Δ091 | JW1227(ychG), JW1227.5(251#6), JW1228(adhE), JW1229(ychE), JW1230(yi2A), |
| | JW1231(yi22), JW1232(yi24), JW1233(yi23), JW1234(251#8.5), JW1235(oppA), |
| | JW1236(oppB), JW1237(oppC), JW1238(oppD), JW1239(oppF), JW1240(yciU) |
| Δ022 | JW1302(sucP), JW1303(258#8), JW1304(ycjO), JW1305(ycjP), JW1306(ycjQ), |
| | JW1307(259#3), JW1308(ycjS), JW1309(ycjT), JW1310(ycjU), JW1311(ycjV), |
| | JW1312(ompG), JW1313(ycjW), JW1314(ycjX), JW1315(ycjF), JW1316(tyrR), |
| | JW1317(tpx), JW1318(ycjG), JW1319(ycjI), JW1319.5(260#10), JW1320(ycjY), |
| | JW1321(ycjZ), JW1321.5(261#1.1), JW1322(mppA), JW1323(ynaI), JW1324(is5B), |
| | JW1325(yi51), JW1326(ynaJ), JW1327(ydaA), JW1328(fnr), JW1329(ogt), |
| | JW1330(ydaH), JW1331(261#9), JW1332(ydaJ), JW1333(262#1), JW1334(ydaL), |
| | JW1335(262#3), JW1336(262#4), JW1336.5(262#5), JW1337(dbpA), JW1338(ydaO), |
| | JW1339(intR), JW1340(ydaQ), JW1341(ydaC), JW1342(lar), JW1343(recT), |
| | JW1344(recE), JW1345(racC), JW1346(ydaE), JW1347(kil), JW1348(sieB), |
| | JW1349(ydaF), JW1350(263#6.1), JW1351(racR), JW1352(263#6.3), JW1353(ydaT), |
| | JW1354(ydaU), JW1355(dnaC), JW1356(ydaW), JW1357(enpP), JW1358(trkG), |
| | JW1359(ynaK), JW1360(ydaY), JW1361(VMTH_LAMBD), JW1362(VLOM_LAMBD), |
| | JW1363(is5B), JW1364(yi51), JW1365(VLOM_LAMBD), JW1366(Y401_LAMBD), |
| | JW1367(yzzL), JW1368(tnpO), JW1369(ynaE), JW1370(upo3), |
| Δ023 | JW1376(ydbH), JW1377(ynbE), JW1378(ydbL), JW1379(feaR), JW1380(feaB), |
| | JW1381(tynA), JW1382(paaZ), JW1383(paaA), JW1384(paaB), JW1385(paaC), |
| | JW1386(paaD), JW1387(paaE) |
| Δ024 | JW1393(paaK), JW1394(paaX), JW1395(paaY), JW1396(ydbA), JW1397(yi22), |
| | JW1398(yi24), JW1399(yi23), JW1400(yi2A), JW1401(268#0.5), JW1402(ydbB), |
| | JW1403(ydbC), JW1404(ydbD), JW1405(269#1), JW1406(ynbB), JW1407(269#3), |
| | JW1408(ynbD) |
| Δ025 | JW1416(ydcA), JW1416.5(271#2), JW1417(trg), JW1418(ydcI), JW1419(271#5), |
| | JW1420(ydcG), JW1421(271#7), JW1422(ydcH), JW1423(rimL) |
| Δ026 | JW1427(272#1), JW1427.5(272#2), JW1428(272#3), JW1429(272#4), JW1430(272#5), |
| | JW1431(prtC), JW1432(yncJ), JW1433(ydcQ), JW1434(yjiR), JW1435(273#4), |
| | JW1436(potA), JW1437(273#6), JW1438(potC), JW1439(ydcW), JW1440(ydcX), |
| | JW1441(ydcY), JW1442(ydcZ/ydcZ/ydcZ/ydcZ), JW1443(274#1), JW1444(yncB), |
| | JW1445(yncC), JW1446(yncD), JW1447(274#5), JW1448(ansP), JW1449(275#2), |
| | JW1450(275#2.1), JW1451(rhsE), JW1452(ydcD), JW1453(yhhI), JW1454(276#2.1), |
| | JW1455(ydcC), JW1456(ydcE), JW1457(yddH), JW1458(nhoA), JW1459(yddE) |
| Δ027 | JW1478(yddO), JW1479(yddP), JW1480(yddQ), JW1481(yddR), JW1482(yddS), |
| | JW1483(280#1), JW1484(dos), JW1485(280#3), JW1486(280#4), JW1487(xasA) |
| Δ028B | JW1505(ydeW), JW1506(rbsA), JW1507(ydeY), JW1508(ydeZ), JW1509(304#1) |
| Δ029B | JW1533(ydfH), JW1534(ydfZ), JW1535(ydfI), JW1536(shiA), JW1537(307#4.1), |
| | JW1538(tnpR), JW1539(ydfM), JW1540(Y314_LAMBD), JW1541(nohA), JW1542(ydfO), |
| | JW1543(yccL), JW1544(cspI) |
| Δ030 | JW1547(ydfR), JW1548(vlyS), JW1549(cspB), JW1550(cspF), JW1551(regQ_LAMBD), |
| | JW1552(309#4), JW1553(rem), JW1554(hokD), JW1555(relE), JW1556(relB), |
| | JW1557(ydfV), JW1558(flxA), JW1559(ydfW), JW1560(ydfX), JW1561(dicC) |
| Δ031C | JW1634(slyA), JW1635(ydhI), JW1636(yhcQ), JW1637(yhcP), JW1638(sodC), |
| | JW1639(ydhF), JW1640(ydhL), JW1641(ydhM), JW1642(nemA), JW1643(gloA) |
| Δ105A | JW1699(btuD), JW1700(btuE), JW1701(btuC) |
| Δ032C | JW1722(ydjC), JW1723(celF), JW1724(celD), JW1725(celC), JW1726(celB), |
| | JW1727(celA), JW1728(osmE) |
| Δ033C | JW1742(ynjA), JW1743(328#9), JW1744(ynjC), JW1745(328#11) |
| Δ034 | JW1771(yeaF), JW1772(yeaG), JW1773(yeaH), JW1774(yeaI), JW1775(yeaJ), |
| | JW1776(yeaK), JW1777(332#0.1), JW1778(yeaL), JW1779(yeaM), JW1780(yeaN), |
| | JW1781(yeaO), JW1782(yoaF), JW1783(332#6), JW1784(333#1), JW1785(yoaG), |
| | JW1786(yeaR), JW1787(yeaS), JW1788(yeaT), JW1789(ttuC), JW1790(caiT), |
| | JW1791(yeaW), JW1792(yeaX) |
| Δ092 | JW1806(manX), JW1807(manY), JW1808(manZ), JW1809(335#5), JW1810(yebN) |
| Δ036 | JW1866(yecT), JW1867(flhE), JW1868(flhA), JW1869(flhB), JW1870(cheZ), |
| | JW1871(cheY), JW1872(cheB), JW1873(cheR), JW1874(tap), JW1875(tar), |
| | JW1876(cheW), JW1877(cheA), JW1878(motB), JW1879(motA), JW1880(flhC), |
| | JW1881(flhD), JW1882(340#3.1), JW1883(340#3.2), JW1884(yecG), JW1885(otsA), |
| | JW1886(otsB), JW1887(araH), JW1888(araG), JW1889(araF), JW1890(yecI), |
| | JW1891(yecJ), JW1892(341#5), JW1893(ftn), JW1894(yecH), JW1895(tyrP) |
| Δ037 | JW1898(uvrC), JW1899(uvrY), JW1900(yecF), JW1901(sdiA), JW1902(yecC), |
| | JW1903(yecS), JW1904(yedO), JW1905(fliY), JW1906(fliZ), JW1907(fliA), |
| | JW1908(fliC), JW1909(fliD), JW1910(fliS), JW1911(fliT), JW1912(amyA), |
| | JW1913(yedD), JW1914(yedE), JW1915(yedF), JW1916(yedK), JW1917(yedL), |
| | JW1918(yedN), JW1919(yedN), JW1920(yedM), JW1921(fliE), JW1922(fliF), |
| | JW1923(fliG), JW1924(fliH), JW1925(fliI), JW1926(fliJ), JW1927(fliK), JW1928(fliL), |
| | JW1929(fliM), JW1930(fliN), JW1931(fliO), JW1932(fliP), JW1933(fliQ), JW1934(fliR), |
| | JW1935(rcsA), JW1936(dsrB), JW1937(344#6) |
| Δ038 | JW1942(yedA), JW1943(vsr), JW1944(dcm), JW1945(yedJ), JW1946(344#15), |
| | JW1947(ompC), JW1948(344#17), JW1949(yedS), JW1950(yedU), JW1951(yedV), |
| | JW1952(copR), JW1953(yedX), JW1954(345#1), JW1955(345#2), JW1956(345#3) |
| Δ039 | JW1972(is5B), JW1973(yi51), JW1974(348#3), JW1975(yi22), JW1976(yi24), |
| | JW1977(yi23), JW1978(yi2A), JW1979(348#3.5), JW1980(348#4), JW1981(yeeP), |
| | JW1982(flu), JW1983(349#2), JW1984(yeeS), JW1985(yeeT), JW1986(yeeU), |
| | JW1987(yeeV), JW1988(yeeW) |
| Δ040 | JW2012(yefJ), JW2013(351#10), JW2014(is5B), JW2015(yi51), JW2016(yefJ), |
| | JW2017(yefI), JW2018(wbbJ), JW2019(yefG), JW2020(rfc), JW2021(glf), |
| | JW2022(rfbX), JW2023(rfbC), JW2024(rfbA), JW2025(rfbD), JW2026(rfbB) |
| Δ041 | JW2052(yegE), JW2053(alkA), JW2054(yegD), JW2055(356#6), JW2056(356#7), |
| | JW2057(356#8), JW2058(356#9), JW2059(yegM), JW2060(yegN), JW2061(yegO), |
| | JW2062(yegB), JW2063(baeS), JW2064(baeR), JW2065(358#3), JW2066(yegQ), |
| | JW2067(ogrK), JW2068(358#6), JW2069(358#6.1), JW2070(yegS), JW2071(gatR), |
| | JW2072(358#8.1), JW2073(358#8.2), JW2074(gatR), JW2075(gatD), JW2076(gatC), |
| | JW2077(gatB), JW2078(gatA), JW2079(is5B), JW2080(yi51), JW2081(gatA), |
| | JW2082(gatZ), JW2083(gatY), JW2084(fbaB), JW2085(xegT), JW2086(yegU), |
| | JW2087(yegV), JW2088(yegW), JW2089(yegX) |
| Δ042 | JW2102(molR), JW2103(molR), JW2104(molR), JW2105(yehI), JW2106(yehK), |
| | JW2107(yehL), JW2108(yehO), JW2109(yehP), JW2110(yehQ), JW2111(yehR), |
| | JW2112(yehS), JW2113(yehT), JW2114(yehU), JW2115(yehV), JW2116(yehW), |
| | JW2117(yehX), JW2118(yehY), JW2119(yehZ), JW2120(bglX), JW2121(dld), |
| | JW2122(pbpG), JW2123(yohC) |
| Δ093 | JW2135(mglC), JW2136(mglA), JW2137(mglB), JW2138(galS) |
| Δ088 | JW2147(yeiI), JW2148(yeiJ), JW2149(yeiK), JW2150(yeiL), JW2151(yeiM), |
| | JW2152(yeiN), JW2153(yeiC) |
| Δ043 | JW2160(yeiQ), JW2161(yeiR), JW2162(yeiU), JW2163(spr), JW2164(rtn), |
| | JW2165(yejA), JW2166(yejB), JW2167(yejE), JW2168(yejF), JW2169(yejG), |
| | JW2170(bcr), JW2171(rsuA), JW2172(yejH) |
| Δ106A | JW2185(ccmE), JW2186(ccmD), JW2187(ccmC), JW2188(ccmB), JW2189(ccmA) |
| ΔK | JW2213(atoS), JW2214(atoC), JW2215(atoD), JW2216(atoA), JW2217(atoE), |
| | JW2218(atoB), JW2219(376#1), JW2220(376#2), JW2221(376#3), JW2222(376#4), |
| | JW2223(376#5) |
| Δ045 | JW2261(elaB), JW2262(elaA), JW2263(elaC), JW2264(elaD), JW2265(yfbK), |
| | JW2266(yfbL), JW2267(yfbM), JW2268(yfbN), JW2269(403#0.1), JW2270(403#1) |
| Δ046 | JW2295(yfcC), JW2296(406#2), JW2297(yfcE), JW2298(yfcF), JW2299(yfcG), |
| | JW2300(folX), JW2301(406#7), JW2302(yfcI), JW2303(hisP), JW2304(hisM), |
| | JW2305(hisQ), JW2306(hisJ), JW2307(argT) |
| Δ047 | JW2345(yfdB), JW2346(411#1), JW2347(yfdH), JW2348(411#2.1), JW2349(ycfA), |
| | JW2350(yfdK), JW2351(yfdL), JW2352(yfdM), JW2353(xylU), JW2354(yfdN), |
| | JW2355(yfdO), JW2356(411#10), JW2357(411#11), JW2358(411#12), |
| | JW2359(411#13), JW2360(411#14) |
| Δ094 | JW2377(yehU), JW2378(414#7), JW2379(yijO), JW2380(ptsA), JW2381(frvX), |
| | JW2382(yqhT), JW2383(ptwC), JW2384(ptwB) |
| Δ095 | JW2527(yphA), JW2528(yphB), JW2529(yphC), JW2530(yphD), JW2531(yphE), |
| | JW2532(yphF), JW2533(yphG), JW2534(yphH) |
| Δ050 | JW2602(intA), JW2603(yfjH), JW2604(alpA), JW2605(yfjI), JW2606(440#5.1), |
| | JW2607(yfjJ), JW2608(yfjK), JW2609(yfjL), JW2610(yfjM), JW2611(yfjN), |
| | JW2612(yfjO), JW2613(yfjP), JW2614(yfjQ), JW2615(yfjR), JW2616(ypjK), |
| | JW2617(yfjS), JW2618(yfjT), JW2619(yfjU), JW2620(yfjV), JW2621(yfjV), |
| | JW2622(442#2.2), JW2623(yfjW), JW2623.5(442#4), JW2624(yfjX), JW2625(yfjY), |
| | JW2626(yfjZ), JW2627(ypjF), JW2628(ypjA), JW2629(443#1.1), JW2630(443#1.2), |
| | JW2631(443#2), JW2632(443#2.1), JW2633(443#2.2), JW2634(443#3) |
| Δ051 | JW2639(ygaE), JW2640(yzzM), JW2641(yqaE), JW2642(445#2), JW2643(ygaP), |
| | JW2644(stpA), JW2645(445#5), JW2646(ygaC), JW2647(ygaM), JW2648(nrdH), |
| | JW2649(nrdI), JW2650(nrdE) |
| Δ096 | JW2652(proV), JW2653(proW), JW2654(proX), JW2655(445#15), JW2656(445#17), |
| | JW2657(ygaZ), JW2658(ygaH) |
| Δ097 | JW2672(srlA), JW2673(srlB), JW2674(srlD), JW2675(gutM), JW2676(srlR), |
| | JW2677(gutQ) |
| Δ052 | JW2723(iap), JW2724(ygbF), JW2725(452#12), JW2726(ygcH), JW2727(452#14), |
| | JW2728(ygcJ), JW2729(ygcK), JW2730(453#2), JW2731(ygcB) |
| Δ053 | JW2735(ptpS), JW2736(ygcN), JW2737(ygcO), JW2738(ygcP), JW2739(ygcQ), |
| | JW2740(ygcR), JW2741(ygcS), JW2742(454#9), JW2743(ygcU), JW2744(ygcU), |
| | JW2745(ygcW), JW2746(yqcE), JW2747(ygcE), JW2748(ygcF), JW2749(ygcG) |
| Δ100 | JW2753(chpA) |
| Δ054 | JW2813(sdaC), JW2814(yqeH), JW2815(yqeI), JW2816(yqeJ), JW2817(yqeK), |
| | JW2818(ygeF), JW2819(ygeG), JW2820(ygeH), JW2821(ygeI), JW2822(x), |
| | JW2823(ygeK), JW2824(464#6), JW2825(464#7), JW2826(yi22), JW2827(yi24), |
| | JW2828(yi23), JW2829(yi2A), JW2830(465#0.1), JW2831(ygeP), JW2832(465#1), |
| | JW2833(nlpD), JW2834(yagR), JW2835(ygeT), JW2836(465#5), JW2837(ygeV), |
| | JW2838(ygeW), JW2839(dpaL), JW2840(ygeY), JW2841(ygeZ), JW2842(arcL), |
| | JW2843(yqeB), JW2844(466#6), JW2845(ygfJ), JW2846(gltD), JW2847(467#1), |
| | JW2848(ygfM), JW2849(yagR), JW2850(ygfO), JW2851(ygfP), JW2852(ygfQ), |
| | JW2853(ygfR), JW2854(ygfS), JW2855(ygfT), JW2856(pbuX), JW2857(idi) |
| Δ098 | JW2900(cmtA), JW2901(cmtB) |
| Δ055 | JW2935(epsM), JW2936(exeL), JW2937(exeC), JW2938(477#5), JW2939(477#6), |
| | JW2940(477#7), JW2941(478#1), JW2942(yghK), JW2943(glcB), JW2944(glcG), |
| | JW2945(glcF), JW2946(glcD), JW2947(glcC), JW2948(502#6), JW2949(is5B), |
| | JW2950(yi51), JW2951(yghQ), JW2952(yghR), JW2953(yghS), JW2954(yghT) |
| Δ056B | JW2988(ygiS), JW2989(ygiT), JW2990(ygiU), JW2991(506#5), JW2992(ygiW), |
| | JW2993(ygiX), JW2994(ygiY), JW2995(ygiZ), JW2996(mdaB), JW2997(ygiN) |
| Δ059 | JW3046(ebgR), JW3047(ebgA), JW3048(ebgC), JW3049(ygjI), JW3050(ygjJ), |
| | JW3051(ygjK), JW3052(fadH), JW3053(ygjM), JW3054(ygjN), JW3055(ygjO), |
| | JW3056(ygjP), JW3057(ygjQ), JW3058(ygjR), JW3059(ygjT), JW3060(ygjU), |
| | JW3061(ygjV), JW3062(uxaA), JW3063(uxaC), JW3064(exuT), JW3065(exuR), |
| | JW3066(yqjA), JW3067(yqjB), JW3068(yqjC), JW3069(yqjD), JW3070(yqjE), |
| | JW3071(yqjK), JW3072(yqjF), JW3073(yqjG), JW3074(yhaH), JW3075(yhaI), |
| | JW3076(yhaJ), JW3077(yhaK), JW3078(yhaL), JW3079(yhaM), JW3080(yhaN), |
| | JW3081(yhaO), JW3082(yhaP), JW3083(yhaQ) |
| Δ060B | JW3093(yhaD), JW3094(yhaE), JW3095(yhaF), JW3096(yhaU), JW3097(yhaG), |
| | JW3098(sohA), JW3099(yhaV), JW3100(agaR), JW3101(agaZ), JW3102(agaV), |
| | JW3103(agaW), JW3104(agaA), JW3105(agaS), JW3106(agaY), JW3107(agaB), |
| | JW3108(agaC), JW3109(agaD), JW3110(agaI), JW3111(yraH), JW3112(yraI), |
| | JW3113(yraJ), JW3114(yraK), JW3115(yraL), JW3116(yraM), JW3117(yraN), |
| | JW3118(yraO), JW3119(yraP), JW3120(yraQ) |
| Δ061C | JW3159(yrbC), JW3160(yrbD), JW3161(yrbE), JW3162(yrbF) |
| Δ062 | JW3181(gltF), JW3182(yhcA), JW3183(yhcD), JW3184(yhcE), JW3185(is5B), |
| | JW3186(yi51), JW3187(yhcE), JW3188(yhcF), JW3189(yhcG), JW3190(yhcH), |
| | JW3191(nanK), JW3192(nanE) |
| Δ064 | JW3230(yhdJ), JW3231(yhdU), JW3232(envR), JW3233(acrE), JW3234(envD), |
| | JW3235(yhdV), JW3236(yhdW), JW3237(yhdX), JW3238(yhdY) |
| Δ065 | JW3284(pinO), JW3285(gspA), JW3286(gspC), JW3287(gspD), JW3288(gspE), |
| | JW3289(hofF), JW3290(hofG), JW3291(hofH), JW3292(gspI), JW3293(gspJ), |
| | JW3294(gspK), JW3295(gspL), JW3296(pshM), JW3297(hofD), JW3298(bfr), |
| | JW3299(yheA), JW3300(chiA) |
| Δ068C | JW3401(gntR), JW3402(yhhW), JW3403(yhhX), JW3404(615#7.1), JW3405(yhhY), |
| | JW3406(yhhZ), JW3407(yrhA), JW3408(insA), JW3409(insB), JW3410(615#10.1), |
| | JW3411(yrhB), JW3412(ggt), JW3413(yhhA) |
| Δ068G | JW3419(livF), JW3420(livG), JW3421(livM), JW3422(livH), JW3423(livK) |
| Δ069 | JW3447(rhsB), JW3448(610#6.1), JW3449(yhhH), JW3450(yibA), JW3451(yhhI), |
| | JW3452(yhhJ), JW3453(yhiH), JW3454(yhiI), JW3455(yhiJ), JW3456(yhiK), |
| | JW3457(yhiL), JW3458(yhiM), JW3459(yhiN) |
| Δ070F | JW3509(dppF), JW3510(dppD), JW3511(dppC), JW3512(dppB), JW3513(dppA) |
| Δ071B | JW3536(xylB), JW3537(xylA), JW3538(xylF), JW3539(xylG), JW3540(xylH) |
| Δ072 | JW3548(yiaL), JW3549(yiaM), JW3550(yiaN), JW3551(yiaO), JW3552(lyx), |
| | JW3553(sgbH), JW3554(sgbU), JW3555(sgbE), JW3556(yiaT), JW3557(yiaU), |
| | JW3558(yiaV), JW3559(yiaW), JW3560(577#1.1), JW3561(aldB), JW3562(yiaY), |
| | JW3563(selB), JW3564(selA), JW3565(yibF), JW3566(rhsA), JW3567(576#2.1), |
| | JW3568(yibA), JW3569(yibJ), JW3570(yibG), JW3570.5(576#7), JW3571(yibH), |
| | JW3572(yibI) |
| Δ074 | JW3650(yidF), JW3651(yidG), JW3652(yidH), JW3653(yidI), JW3654(yidJ), |
| | JW3655(yidK), JW3656(yidL), JW3657(567#9.1), JW3658(glvG), JW3659(glvB), |
| | JW3660(glvC), JW3661(yidP), JW3662(yidE) |
| Δ075 | JW3665(yidQ), JW3666(yidR), JW3667(yidS), JW3668(dgoT), JW3669(dgoA), |
| | JW3670(dgoK), JW3671(dgoR), JW3672(yidW), JW3673(yidX), JW3674(yidA), |
| | JW3675(yidB) |
| Δ076 | JW3722(asnA), JW3723(yieM), JW3724(559#4), JW3725(yieN), JW3726(kup), |
| | JW3727(rbsD), JW3728(rbsA), JW3729(rbsC), JW3730(rbsB), JW3731(rbsK), |
| | JW3732(rbsR), JW3733(yieO) |
| Δ078 | JW3843(yihL), JW3844(yihM), JW3845(yihN), JW3846(yshA), JW3847(yihO), |
| | JW3848(yihP), JW3849(yihQ), JW3850(yihR), JW3851(yihS), JW3852(yihT), |
| | JW3853(yihU), JW3854(yihV), JW3855(yihW), JW3856(yihX), JW3857(rbn), |
| | JW3858(yihZ), JW3859(yiiD), JW3860(yiiE), JW3861(yiiF) |
| Δ079 | JW3867(yiiG), JW3868(frvR), JW3869(frvX), JW3870(frvB), JW3871(frvA), |
| | JW3872(yiiL), JW3873(rhaD), JW3874(rhaA), JW3875(rhaB), JW3876(rhaS), |
| | JW3877(rhaR), JW3878(rhaT) |
| Δ080 | JW3919(ptsA), JW3920(536#1), JW3921(frwC), JW3922(frwB), JW3923(pflD), |
| | JW3924(pflC), JW3925(frwD), JW3926(yijO), JW3927(yijP) |
| Δ081 | JW3986(633#6), JW3987(yjbF), JW3988(yjbG), JW3989(yjbH), JW3989.5(633#10), |
| | JW3990(yjbA), JW3991(xylE), JW3992(malG), JW3993(malF), JW3994(malE), |
| | JW3995(malK), JW3996(lamB), JW3997(malM), JW3998(yjbI) |
| Δ082 | JW4041(yjcP), JW4042(yjcQ), JW4043(yjcR), JW4044(yjcS), JW4045(alsK), |
| | JW4046(alsE), JW4047(alsC), JW4048(alsA), JW4049(alsB) |
| Δ083 | JW4052(phnQ), JW4053(phnP), JW4054(phnO), JW4055(phnN), JW4056(phnM), |
| | JW4057(phnL), JW4058(phnK), JW4059(phnJ), JW4060(phnI), JW4061(phnH), |
| | JW4062(phnG), JW4063(phnF), JW4064(phnE), JW4065(phnE), JW4066(phnD), |
| | JW4067(phnC), JW4068(phnB), JW4069(phnA), JW4070(yjdA), JW4071(yjcZ) |
| Δ084 | JW4139(yjfI), JW4140(yjfJ), JW4141(yjfK), JW4142(yjfL), JW4143(yjfM), JW4144(yjfC), |
| | JW4145(aidB), JW4146(yjfN), JW4147(yjfO), JW4148(yjfP), JW4149(yjfQ), |
| | JW4150(yjfR), JW4151(sgaT), JW4152(sgaB), JW4153(sgaA), JW4154(sgaH), |
| | JW4155(sgaU) |
| Δ108A | JW4186(ytfQ), JW4187(ytfR), JW4188(ytfS), JW4189(ytfT), JW4190(yjfF) |
| Δ099 | JW4198(treC), JW4199(treB), JW4200(treR) |
| Δ085 | JW4227(intB), JW4228(660#10.1), JW4229(yi2A), JW4230(yi22), JW4231(yi24), |
| | JW4232(yi23), JW4233(yjgW), JW4234(yjgX), JW4235(yjgY), JW4236(yjgZ), |
| | JW4237(yi41), JW4238(yi42), JW4239(yjhB), JW4240(yjhC), JW4241(yjhD), |
| | JW4242(yjhE), JW4243(yi91), JW4244(662#3.2), JW4245(662#4), JW4246(662#5) |
| Δ086 | JW4254(insA), JW4255(insB), JW4256(insB), JW4257(yjhU), JW4258(yjhF), |
| | JW4259(yjhG), JW4260(yjhH), JW4261(yjhI), JW4262(sgcR), JW4263(sgcE), |
| | JW4264(sgcA), JW4265(sgcQ), JW4266(sgcC), JW4266.5(664#6), JW4267(sgcX), |
| | JW4268(yjhP), JW4269(yjhQ), JW4269.5(664#11), JW4270(664#12), |
| | JW4270.5(664#13), JW4271(yjhR), JW4272(yjhS), JW4273(yjhT), JW4274(yjhA), |
| | JW4275(fimB), JW4276(fimE), JW4277(fimA), JW4278(fimI), JW4279(fimC), |
| | JW4280(fimD), JW4281(fimF), JW4282(fimG), JW4283(fimH), JW4284(gntP), |
| | JW4285(uxuA), JW4286(uxuB), JW4287(uxuR), JW4288(yjiC), JW4289(yjiD), |
| | JW4290(yjiE), JW4291(iadA), JW4292(yjiG), JW4293(yjiH), JW4294(yjiI), JW4295(yjiJ), |
| | JW4296(yjiK), JW4296.5(668#5), JW4297(yjiL), JW4298(yjiM), JW4299(yjiN), |
| | JW4300(yjiO), JW4301(yjiP), JW4302(yjiQ), JW4303(yjiR), JW4304(yjiS), JW4305(yjiT), |
| | JW4306(yjiV), JW4307(mcrD), JW4308(mcrC), JW4309(mcrB), JW4310(yjiW), |
| | JW4311(hsdS), JW4312(hsdM), JW4313(hsdR), JW4314(mrr), JW4315(yjiA), |
| | JW4316(yjiX), JW4317(yjiY), JW4318(tsr), JW4319(yjjL), JW4320(671#8), |
| | JW4321(yjjM), JW4322(yjjN), JW4323(mdoB), JW4324(yjjA) |

### EXAMPLE 3

### Preparation of Mutant Strain of E. coli having Chromosomal DNA with Multiple Partial Deletions

[0530] Mutants of E. coli having chromosomal DNA with multiple partial deletions were prepared using E. coli W3 11 Ored strains and accumulating the deleted regions that would not affect growth, which had been identified in Example 2, in E. coli W3110red strains by repeating the procedure of Example 1. Table 3 shows deleted regions of mutants of E. coli having chromosomal DNA with multiple partial deletions.

### EXAMPLE 4

### Evaluation of Mutant Strain of E. coli having Chromosomal DNA with Multiple Partial Deletions by Culturing (1)

[0531] Various mutants of E. coli having chromosomal DNA with multiple partial deletions obtained in Example 3 were applied to LB agar medium and cultured at 30° C. overnight to obtain cell strains. Small amounts of such strains were inoculated into 1 ml of LB medium that contained 3% glucose, and culturing was carried out overnight to obtain culture products. The culture products (50 μl) were inoculated into 5 ml of LB medium that contained 3% glucose, and culturing was carried out at 30° C. for 24 hours. After the completion of culturing, turbidity was measured based on absorption at 590 nm. The results are shown in Table 3.

[symbol]

3

| | | | Finally |
|---|---|---|---|
| | | Total | reached |
| | | deleted | turbid- |
| Strain | | length | ity |
| name | Deleted region | (kbp) | (%) |
| W3110red | None | 0.0 | 100 |
| Step1 | Δ018 | 48.1 | 102 |
| Step2 | Deleted region possessed by Step1, Δ055 | 72.4 | 106 |
| Step3 | Deleted region possessed by Step2, Δ081 [symbol] | 117.7 | 94 |
| | Δ082 [symbol] Δ083 | | |
| Step4 | Deleted region possessed by Step3, Δ019 | 144.7 | 98 |
| Step5 | Deleted region possessed by Step4, | 162.4 | 99 |
| | Δ029B [symbol] Δ030 | | |
| Step6 | Deleted region possessed by Step5, | 236.0 | 96 |
| | Δ009B [symbol] Δ010, Δ011 | | |
| Step7 | Deleted region possessed by Step6, Δ078 [symbol] | 279.8 | 106 |
| | Δ079 [symbol] Δ080 | | |
| Step8 | Deleted region possessed by Step7, Δ054 | 327.5 | 104 |
| Step9 | Deleted region possessed by Step8, Δ001 [symbol] | 477.1 | 112 |
| | Δ002 [symbol] Δ007 | | |
| Step10 | Deleted region possessed by Step9, Δ074 [symbol] | 510.4 | 123 |
| | Δ075 [symbol] Δ077 | | |
| Step11 | Deleted region possessed by Step10, | 605.9 | 123 |
| | Δ036 [symbol] Δ037 [symbol] Δ038 [symbol] Δ039 [symbol] Δ040 | | |
| Step12 | Deleted region possessed by Step11, | 656.2 | 153 |
| | Δ050 [symbol] Δ051 [symbol] Δ096 [symbol] Δ097 | | |
| Step13 | Deleted region possessed by Step12, Δ062 | 666.0 | 155 |
| Step14 | Deleted region possessed by Step13, | 744.4 | 189 |
| | Δ041 [symbol] Δ042 [symbol] Δ043 [symbol] Δ088 | | |
| Step15 | Deleted region possessed by Step14, Δ098 | 746.2 | 178 |
| Step16 | Deleted region possessed by Step15, | 841.3 | 190 |
| | Δ085 [symbol] Δ086 | | |
| Step17 | Deleted region possessed by Step16, Δ013 | 852.1 | 180 |
| Step18 | Deleted region possessed by Step17, Δ084 | 865.7 | 195 |

[0532] As shown in Table 3, mutants of E. coli having chromosomal DNA with multiple partial deletions, the total extent of such deletion being 470 kbp or more, exhibited substantially increased turbidity 24 hours after culturing in relation to the total extent of deletion. Cell morphologies of E. coli mutants were the same as those of wild-type E. coli strains, and mutants of E. coli having chromosomal DNA with multiple partial deletions, and the total extent of such deletion being 470 kbp or more, were found to yield more cells via culturing than wild-type E. coli strains.

### EXAMPLE 5

### Evaluation of Mutant Strain of E. coli having Chromosomal DNA with Multiple Partial Deletions by Culturing (2)

[0533] In order to confirm that increase of cell mass confirmed in Example 4 does not solely result from the regions that had been newly deleted from various mutants, mutants resulting from deletions from the mutants shown in Table 3 were prepared in accordance with the methods described in Example 1 and Example 3, culturing was carried out in the same manner as in Example 4, and turbidity 24 hours after the initiation of culturing was measured. The results are shown in Table 4.

TABLE 4

| | | | Finally |
|---|---|---|---|
| Strain | | Total deleted | reached |
| name | Deleted region | length (kbp) | turbidity (%) |
| W3110red | None | 0.0 | 100 |
| Unit1 | Δ018 | 48.1 | 102 |
| Unit2 | Δ055 | 24.2 | 107 |
| Unit3 | Δ081 [symbol] Δ082 [symbol] Δ083 | 45.3 | 93 |
| Unit4 | Δ019 | 27.0 | 108 |
| Unit5 | Δ029B [symbol] Δ030 | 17.7 | 99 |
| Unit6 | Δ009B [symbol] Δ010 [symbol] Δ011 | 73.6 | 100 |
| Unit7 | Δ078 [symbol] Δ079 [symbol] Δ080 | 43.8 | 101 |
| Unit8 | Δ054 | 47.8 | 108 |
| Unit9 | Δ001 [symbol] Δ002 [symbol] Δ007 | 149.6 | 101 |
| Unit10 | Δ074 [symbol] Δ075 [symbol] Δ077 | 33.3 | 94 |
| Unit11 | Δ036 [symbol] Δ037 [symbol] Δ038 [symbol] Δ039 [symbol] Δ040 | 95.5 | 110 |
| Unit12 | Δ050 [symbol] Δ051 [symbol] Δ096 [symbol] Δ097 | 50.3 | 96 |
| Unit13 | Δ062 | 9.8 | 100 |
| Unit14 | Δ041 [symbol] Δ042 [symbol] Δ043 [symbol] Δ088 | 78.4 | 109 |
| Unit15 | Δ098 | 1.8 | 98 |
| Unit16 | Δ085 [symbol] Δ086 | 95.1 | 94 |
| Unit17 | Δ013 | 10.8 | 102 |
| Unit18 | Δ084 | 13.6 | 93 |

[0534] As shown in Table 4, new deletions would not result in increased turbidity. Accordingly, the increased cell mass observed in Example 4 was not attained by accumulation of deletions that would increase the amount of cells. However, it was demonstrated that such increase resulted from multiple and simultaneous occurrence of deletions of chromosomal DNA that would not solely affect growth.

### EXAMPLE 6

### Preparation of Mutant Strain of E. coli having Chromosomal DNA with Multiple Partial Deletions (2)

[0535] The Step 18 strain shown in Table 3 was designated as a parent strain, and a strain to which deletion of the Δ043 region shown in Table 2 had been returned was prepared in the following manner.

[0536] In accordance with the method of Example 3, a strain that lacks Δ041 and Δ042 regions from the E. coli W3110red strain was obtained. Subsequently, a cassette comprising the sacB gene and the cat gene ligated thereto (hereafter referred to as “sacB_cat;” see FIG. 1) was introduced into the Δ088 region adjacent to the Δ043 region to obtain strains (hereafter referred to as the “E. coli W3110red Δ041, Δ042, and Δ088::sacB_cat strains”).

[0537] P1-transducing phages were prepared from the E. coli W3110red Δ041, Δ042, and Δ088::sacB_cat strains in accordance with the method described in Example 1 (1), the Stepl8 strains were transformed with the P1 phages in accordance with the method described in Example 1 (1), and chloramphenicol-resistant strains were obtained. Thus, strains comprising the sacB/cat cassettes inserted into the Δ088 regions were selected.

[0538] Among the selected Step 18 transformants, strains to which the Δ043 regions have been returned, were selected in accordance with the method for detecting deletions described in Example 1 (2) (iii). sacB_cat on chromosomal DNA of the selected strain was eliminated by the method described in Example 1 (2) (iv) to obtain a Step 18γ strain having chromosomal DNA that lacks regions shown in Table 5.

[0539] Subsequently, chromosomal DNA of the Step 18γ strain was further subjected to deletion to prepare E. coli strains by the method described in Example 1 and Example 3. Table 5 shows mutants of E. coli having chromosomal DNA with multiple partial deletions.

TABLE 5

| | | | Turbidity | |
|---|---|---|---|---|
| | | | of culture | |
| | | | product | |
| | | Total | (absolute value) | |
| | | deletion | After | After |
| | | length | 19 | 36 |
| Strain name | Deleted region | (kbp) | hours | hours |
| Step18γ | Δ001 [symbol] Δ002 [symbol] Δ007 [symbol] Δ009B [symbol] | 865.7 | 5.54 | 6.64 |
| | Δ010 [symbol] Δ011 [symbol] Δ013 [symbol] Δ018 [symbol] | | | |
| | Δ019 [symbol] Δ029B [symbol] Δ030 [symbol] Δ036 [symbol] | | | |
| | Δ037 [symbol] Δ038 [symbol] Δ039 [symbol] Δ040 [symbol] | | | |
| | Δ041 [symbol] Δ042 [symbol] Δ088 [symbol] Δ050 [symbol] | | | |
| | Δ051 [symbol] Δ096 [symbol] Δ097 [symbol] Δ054 [symbol] | | | |
| | Δ098 [symbol] Δ055 [symbol] Δ062 [symbol] Δ074 [symbol] | | | |
| | Δ075 [symbol] Δ077 [symbol] Δ078 [symbol] Δ079 [symbol] | | | |
| | Δ080 [symbol] Δ081 [symbol] Δ082 [symbol] Δ083 [symbol] | | | |
| | Δ084 [symbol] Δ085 [symbol] Δ086 | | | |
| Step19 | Deleted region possessed by | 884.1 | 5.49 | 6.69 |
| | Step18γ, Δ069 | | | |
| Step20 | Deleted region possessed by | 933.8 | 5.27 | 7.52 |
| | Step19, Δ014 [symbol] Δ015 [symbol] Δ016 | | | |
| Step21 | Deleted region possessed by | 941.1 | 5.25 | 7.85 |
| | Step20, Δ056B | | | |
| Step22 | Deleted region possessed by | 955.4 | 5.50 | 7.57 |
| | Step21, Δ012 | | | |
| Step23 | Deleted region possessed by | 985.2 | 5.35 | 7.61 |
| | Step22, Δ046 [symbol] Δ047 [symbol] Δ094 | | | |
| Step24 | Deleted region possessed by | 1001.6 | 5.61 | 8.01 |
| | Step23, Δ065 | | | |
| Step25 | Deleted region possessed by | 1010.8 | 5.43 | 7.69 |
| | Step24, Δ045 | | | |
| Step26 | Deleted region possessed by | 1020.5 | 5.62 | 7.87 |
| | Step25, Δ064 | | | |
| Step27 | Deleted region possessed by | 1020.8 | 5.52 | 7.90 |
| | Step26, Δ100 | | | |
| Step28 | Deleted region possessed by | 1026.7 | 5.36 | 7.61 |
| | Step27, Δ103 | | | |

### EXAMPLE 7

### Evaluation of Culture of Mutant Obtained in Example 6 by Culturing

[0540] Various mutants obtained in Example 6 were applied to LB agar medium and cultured at 37° C. overnight to obtain cell strains. Small amounts of such strains were inoculated into 5 ml of LB medium containing 50 mg/l of kanamycin and culturing was carried out overnight to obtain culture products. The culture products (50 μl) were inoculated into 5 ml of M9 medium that contained 1% glucose, 5 mg/l of iron sulfate and 20 g/l of calcium carbonate, shaking culture was conducted at 37° C., and 0, 6, 10, 13, 16, 19, and 32 hours after the initiation of culturing, turbidity was measured based on absorption at 660 nm.

[0541] Table 5 shows turbidity 19 and 32 hours after the initiation of culturing. Mutants with total deleted regions exceeding 933 kbp continuously exhibited increases in turbidity 19 hours after the initiation of culture and thereafter, at which point increase in turbidity of the parent strain appeared to have stopped and entered into a stationary phase. That is, mutants of E. coli strains having chromosomal DNA with total deleted regions of 933 kbp or more and with multiple partial deletions were found to yield a greater number of cells via culturing than wild-type E. coli strains.

### EXAMPLE 8

### Preparation of Substance using Mutant Strain of E. coli having Chromosomal DNA with Multiple Partial Deletions 1

[0542] (1) Preparation of Threonine Auxotrophic Mutant

[0543] In accordance with the method of Example 1, threonine auxotrophic mutants that lack the threonine biosynthesis operon on chromosomal DNA of the E. coli W3110red strains (the thrABC gene comprising a nucleotide sequence comprising nucleotides 36 to 5175 of the nucleotide sequence as shown in SEQ ID NO: 1) were produced and designated as the E. coli W3110redΔT strains.

[0544] (2) Preparation of Mutant that Lacks Meta Gene and Comprises Threonine Biosynthesis Gene Introduced Therein

[0545] (i) Preparation of DNA Fragment for MetA Gene Deletion and thrABC Gene Introduction

[0546] PCR was carried out using, as a template, chromosomal DNA of the E. coli W3110red strain and, as a primer set, DNA comprising the nucleotide sequence as shown in SEQ ID NO: 16 and DNA comprising the nucleotide sequence as shown in SEQ ID NO: 17. Thus, a DNA fragment having the nucleotide sequence in the 5′ upstream region of the metA gene was amplified.

[0547] PCR was carried out using LA-Taq, and a reaction solution was prepared in accordance with the instructions included therein. Purified chromosomal DNA (10 ng) and 20 pmol of each primer DNA were added to the reaction solution, and PCR was carried out. PCR was carried out by incubating at 94° C. for 2 minutes, repeating a cycle of 94° C. for 15 seconds, 55° C. for 20 seconds, and 68° C. for 90 seconds 25 times, and then incubating at 72° C. for 10 minutes.

[0548] The above PCR procedure verified that a target DNA fragment (fragment 1) had been obtained. By the similar method, a DNA fragment (fragment 2) comprising a nucleotide sequence of the 3′ downstream region of the metA gene was obtained using DNA comprising the nucleotide sequence as shown in SEQ ID NO: 18 and DNA comprising the nucleotide sequence as shown in SEQ ID NO: 19 as primer DNAs.

[0549] Subsequently, PCR was carried out using, as a template, chromosomal DNA of the E. coli W3110red strain and, as a primer set, DNA comprising the nucleotide sequence as shown in SEQ ID NO: 20 and DNA comprising the nucleotide sequence as shown in SEQ ID NO: 21 to amplify a DNA fragment containing threonine operon (thrABC gene).

[0550] PCR was carried out using LA-Taq, and a reaction solution was prepared in accordance with the instructions included therein. Purified chromosomal DNA (10 ng) and 20 pmol of each primer DNA were added to the reaction solution, and PCR was carried out.

[0551] PCR was carried out by incubating at 94° C. for 2 minutes, repeating a cycle of 94° C. for 15 seconds, 55° C. for 20 seconds, and 68° C. for 5 minutes 25 times, and then incubating at 72° C. for 10 minutes.

[0552] The above PCR procedure verified that a DNA fragment containing the thrABC gene (fragment 3) had been obtained.

[0553] Also, PCR was carried out using, as a template, pHSG399 plasmid DNA (Takara Bio Inc.) and, as a primer set, DNA having the nucleotide sequence as shown in SEQ ID NO: 22 and DNA having the nucleotide sequence as shown in SEQ ID NO: 23 to amplify a DNA fragment containing a chloramphenicol-resistant gene (cat gene).

[0554] PCR was carried out using LA-Taq, and a reaction solution was prepared in accordance with the instructions included therein. Plasmid DNA (40 ng) and 20 pmol of each primer DNA were added to the reaction solution, and PCR was carried out.

[0555] PCR was carried out by incubating at 94° C. for 2 minutes, repeating a cycle of 94° C. for 15 seconds, 55° C. for 20 seconds, and 68° C. for 1 minute 25 times, and then heating at 72° C. for 10 minutes.

[0556] The above PCR procedure verified that a DNA fragment containing the chloramphenicol-resistant gene (fragment 4) had been obtained.

[0557] The fragments 1 to 4 obtained by PCR were purified using the QIA quick Gel Extraction Kit (Qiagen) and dissolved in 50 μl of water to obtain DNA solutions. Primer sets of DNA as shown in SEQ ID NO: 17 and DNA as shown in SEQ ID NO: 22, DNA as shown in SEQ ID NO: 19 and DNA as shown in SEQ ID NO: 21, and DNA as shown in SEQ ID NO: 20 and DNA as shown in SEQ ID NO: 23 used in PCR each have an annelining sequence, i.e., a complementary sequence.

[0558] PCR was carried out using as templates the fragments 1 to 4 obtained above and, as a primer set, DNA comprising the nucleotide sequence as shown in SEQ ID NO: 24 and DNA comprising the nucleotide sequence as shown in SEQ ID NO: 25 to amplify a DNA fragment comprising the threonine operon gene and the chloramphenicol-resistant gene ligated in the same transcription direction and comprising DNA having nucleotide sequences of the 5′ upstream region and the 3′ downstream region of the metA gene further ligated to both ends thereof.

[0559] PCR was carried out using LA-Taq, and a reaction solution was prepared in accordance with the instructions included therein. The DNA solutions (1 μl each) and 20 pmol of each primer DNA were added to the reaction solution, and PCR was carried out.

[0560] PCR was carried out by incubating at 94° C. for 2 minutes, repeating a cycle of 94° C. for 15 seconds, 55° C. for 20 seconds, and 68° C. for 7 minutes 25 times, and then incubating at 72° C. for 10 minutes.

[0561] The above PCR procedure verified that a target DNA fragment had been obtained (hereafter referred to as a “DNA fragment for threonine operon gene introduction”). The DNA fragment was purified using the QIA quick Gel Extraction Kit and dissolved in 50 μl of water to obtain a DNA solution.

[0562] (ii) Transformation of E. coli w3110redA Strains

[0563] The competent cells of the E. coli w3110redA strains obtained in (1) above were prepared in accordance with the method described in Example 1 (2) (i).

[0564] The DNA fragment (0.1 μg) used for threonine operon gene introduction obtained in (2) (i) above was added to 50 ,l of a solution of E. coli W3110redA competent cells, and electroporation was carried out using a 0.1 −cm cuvette at 1.8 kV and 25 μF.

[0565] Strains in which the metA gene region had been substituted with a DNA fragment for threonine operon gene introduction on chromosomal DNA were selected on an LBcm plate. From among the DNA fragments for threonine operon gene introduction obtained in (2)(i) above, strains into which mutation had been introduced at the time of PCR and into which threonine operon genes encoding inactive threonine biosynthesis proteins had been introduced were to be selected. To this end, strains that would grow on LB agar medium but would not grow on M9 met agar minimal medium (1% glucose, 0.6% sodium phosphate, 0.3% potassium dihydrogenphosphate, 0.05% sodium chloride, 0.1% ammonium chloride, 2 mmol/l of magnesium sulfate heptahydrate, 100 μmol/l of calcium chloride, 10 mg/l of ferric sulfate, and 100 mg/l of methionine), i.e., threonine auxotrophic mutants, were selected from among transformants selected on the LBcm plate. It was confirmed that such strains comprised inactive threonine biosynthesis genes inserted into the metA genes on chromosomal DNA and designated as the E. coli Thr1 strains (W3110redΔT, ΔmetA::thrABC).

[0566] (iii) Preparation of Threonine Operon having Desensitizing Mutation and Attenuator Mutation

[0567] PCR was carried out using, as a template, chromosomal DNA of the E. coli W3110red strain and, as a primer set, DNA comprising the nucleotide sequence as shown in SEQ ID NO: 26 and DNA comprising the nucleotide sequence as shown in SEQ ID NO: 27 to amplify a DNA fragment comprising part of the desensitizing thrA gene and a nucleotide sequence of the upstream region of the threonine operon. Specifically, DNA as shown in SEQ ID NO: 27 has the desensitizing mutation described in J. Bacteriol., 185, 5442-5461, 2003.

[0568] PCR was carried out using LA-Taq and a reaction solution was prepared in accordance with the instructions included therein. Chromosomal DNA (10 ng) and 20 pmol of each primer DNA were added to the reaction solution and PCR was then carried out.

[0569] PCR was carried out by incubating at 94° C. for 2 minutes, repeating a cycle of 94° C. for 15 seconds, 55° C. for 20 seconds, and 68° C. for 2 minutes and 30 seconds 25 times, and then incubating at 72° C. for 10 minutes.

[0570] The above PCR procedure verified that a target DNA fragment had been obtained. The DNA fragment was purified using the QIA quick Gel Extraction Kit and dissolved in 50 II of water to obtain a DNA solution.

[0571] Subsequently, PCR was carried out using, as a template, chromosomal DNA of the E. coli W3110red strain and, as a primer set, DNA comprising the nucleotide sequence as shown in SEQ ID NO: 20 and DNA comprising the nucleotide sequence as shown in SEQ ID NO: 28 to amplify a DNA fragment comprising part of the desensitising thrA gene and a nucleotide sequence downstream of the threonine operon. That is, DNA as shown in SEQ ID NO: 28 has a desensitizing mutation described in J. Bacteriol., 185, 5442-5461, 2003.

[0572] PCR was carried out using LA-Taq and a reaction solution was prepared in accordance with the instructions included therein. Chromosomal DNA (10 ng) and 20 pmol of each primer DNA were added to the reaction solution and PCR was then carried out.

[0573] PCR was carried out by incubating at 94° C. for 2 minutes, repeating a cycle of 94° C. for 15 seconds, 55° C. for 20 seconds, and 68° C. for 3 minutes and 30 seconds 25 times, and then incubating at 72° C. for 10 minutes.

[0574] The above PCR procedure verified that a target DNA fragment had been obtained. The DNA fragment was purified using the QIA quick Gel Extraction Kit and dissolved in 50 ml of water to obtain a DNA solution.

[0575] PCR was carried out using, as a template, a DNA fragment comprising upstream and downstream nucleotide sequences of the threonine operon containing part of the desensitising thrA gene obtained via PCR above and, as a primer set, DNA comprising the nucleotide sequence as shown in SEQ ID NO: 20 and DNA comprising the nucleotide sequence as shown in SEQ ID NO: 29 to amplify a threonine operon DNA fragment containing the desensitising thrA gene.

[0576] PCR was carried out using LA-Taq and a reaction solution was prepared in accordance with the instructions included therein. The DNA solution (1 μl each) and 20 pmol of each primer DNA were added to the reaction solution, and PCR was carried out.

[0577] PCR was carried out by incubating at 94° C. for 2 minutes, repeating a cycle of 94° C. for 15 seconds, 55° C. for 20 seconds, and 68° C. for 5 minutes 25 times, and then incubating at 72° C. for 10 minutes.

[0578] The above PCR procedure verified that a target DNA fragment had been obtained. The DNA fragment was purified using the QIA quick Gel Extraction Kit and dissolved in 50 μl of water to obtain a DNA solution.

[0579] Subsequently, PCR was carried out using, as a template, a threonine operon DNA fragment containing the desensitising thrA gene obtained above and, as a primer set, DNA comprising the nucleotide sequence as shown in SEQ ID NO: 29 and DNA comprising the nucleotide sequence as shown in SEQ ID NO: 30 to amplify a DNA fragment having a nucleotide sequence upstream of a threonine operon comprising an attenuator mutation. Specifically, DNA comprising the nucleotide sequence as shown in SEQ ID NO: 30 comprises an attenuator mutation of a threonine operon described in J. Mol. Biol., 183, 529-541, 1985.

[0580] PCR was carried out using LA-Taq and a reaction solution was prepared in accordance with the instructions included therein. A DNA solution of a template DNA fragment (1 μl) and 20 pmol of each primer DNA were added to the reaction solution, and PCR was carried out.

[0581] PCR was carried out by heating at 94° C. for 2 minutes, repeating a cycle of 94° C. for 15 seconds, 55° C. for 20 seconds, and 68° C. for 5 minutes 25 times, and then heating at 72° C. for 10 minutes.

[0582] The above PCR procedure verified that a target DNA fragment (fragment 5) had been obtained.

[0583] Subsequently, PCR was carried out using, as a template, a threonine operon DNA fragment containing the desensitising thrA gene obtained above and, as a primer set, DNA comprising the nucleotide sequence as shown in SEQ ID NO: 31 and DNA comprising the nucleotide sequence as shown in SEQ ID NO: 20 to amplify a DNA fragment having a nucleotide sequence downstream of a threonine operon comprising an attenuator mutation. That is, DNA comprising the nucleotide sequence as shown in SEQ ID NO: 31 comprises an attenuator mutation of threonine operon described in J. Mol. Biol., 183, 529-541, 1985.

[0584] PCR was carried out using LA-Taq and a reaction solution was prepared in accordance with the instructions included therein. A DNA solution of the template DNA fragment (1 μl) and 20 pmol of each primer DNA were added to the reaction solution, and PCR was carried out.

[0585] PCR was carried out by incubating at 94° C. for 2 minutes, repeating a cycle of 94° C. for 15 seconds, 55° C. for 20 seconds, and 68° C. for 4 minutes and 30 seconds 25 times, and then incubating at 72° C. for 10 minutes.

[0586] The above PCR procedure verified that a target DNA fragment (fragment 6) had been obtained.

[0587] Fragment 5 and fragment 6 obtained by the above PCR were purified using the QIA quick Gel Extraction Kit and dissolved in 50 μl of water to obtain DNA solutions.

[0588] PCR was carried out using as templates fragment 5 and fragment 6 obtained above and, as a primer set, DNA comprising the nucleotide sequence as shown in SEQ ID NO: 20 and DNA comprising the nucleotide sequence as shown in SEQ ID NO: 21 to amplify a DNA fragment having a highly active threonine operon comprising the desensitising thrA gene and an attenuator mutation for increasing the expression level.

[0589] PCR was carried out using LA-Taq and a reaction solution was prepared in accordance with the instructions included therein. The DNA solution containing fragment 5 and fragment 6 (1 μl each) and 20 pmol of each primer DNA were added to the reaction solution, and PCR was carried out.

[0590] PCR was carried out by incubating at 94° C. for 2 minutes, repeating a cycle of 94° C. for 15 seconds, 55° C. for 20 seconds, and 68° C. for 5 minutes 25 times, and then incubating at 72° C. for 10 minutes.

[0591] The above PCR procedure verified that a target DNA fragment had been obtained. The DNA fragment was purified using the QIA quick Gel Extraction Kit and dissolved in 50 μl of water to obtain a DNA solution.

[0592] (iv) Preparation of E. coli Strain Possessing Highly Active Threonine Operon Comprising Desensitising thrA Gene and Attenuator Mutation

[0593] Competent cells of the E. coli Thr1 strains prepared in (ii) above were prepared in accordance with the method described in Example 1 (2) (i).

[0594] A DNA fragment (0.1 μg) having the highly active threonine operon comprising the desensitising thrA gene and attenuator mutation obtained in (iii) above was added to 50 μl of a solution of competent cells of the E. coli Thr1 strain, and electroporation was carried out using a 0.1 cm cuvette at 1.8 kV and 25 μF.

[0595] A transformant in which an inactive threonine operon has been substituted with a highly active threonine operon comprising the desensitising thrA gene and an attenuator mutation on chromosomal DNA was selected as a strain that would grow without exhibiting threonine auxotrophy using M9 met agar minimal medium. Such strain was confirmed to comprise the highly active threonine operon comprising the desensitising thrA gene and attenuator mutation inserted into the meta gene on chromosomal DNA and designated as the E. coli Thr2 strain.

[0596] (3) Fermentative Production of Threonine

[0597] In accordance with the method described in Example 1 (1), P1 transducing phages were prepared from the E. coli Thr2 strains. With the use of such phages, the E. coli W3110red strains and E. coli mutant strains comprising chromosomal DNAs with multiple partial deletions, which had been prepared in Example 3 and Example 6 (Step 2, Step4, Step6, Step8, Step10, Step12, Step14, Step16, Step18γ, Step20, Step22, Step24, Step26, and Step28), were subjected to P1 phage-mediated transduction in accordance with the method described in Example 1 (1). Strains in which a highly active threonine operon comprising the desensitising thrA gene and attenuator mutation derived from the E. coli Thr2 strain have been inserted into the meta gene of the mutant strains were selected as chloramphenicol-resistant strains and designated as W3110redT, Step2T, Step4T, Step6T, Step8T, Step10T, Step12T, Step14T, Step16T, Step18γT, Step20T, Step22T, Step24T, Step26T, and Step28T, respectively.

[0598] The transformants were applied to the LBcm plate described in Example 1 and cultured at 37° C. overnight. Small amounts of cells were scraped from the plate and inoculated into a 300-ml conical flask with baffles containing 25 ml of threonine-producing medium (50 g/l of glucose, 20 g/l of ammonium sulfate, 1 g/l of monopotassium phosphate, 2 g/l of Bacto yeast extract, 0.5 g/l of magnesium sulfate heptahydrate, 5 mg/l of iron sulfate, 5 mg/l of manganese sulfate, 30 g/l of calcium carbonate, and 120 mg/l of methionine), followed by culturing in rotary shaker at 30° C. and 250 rpm for 48 hours. During culturing, glucose was added thereto to a concentration of 20 g/l therein 24 hours after the initiation of culturing, and glucose was also added to culture solutions of Step10T, Step12T, Step14T, Step16T, Step18γT, Step20T, Step22T, Step24T, Step26T, and Step28T to a concentration of 20 g/l therein, 36 hours after the initiation of culturing.

[0599] After the completion of culturing, threonine that had been accumulated in the culture solution was quantified using an amino acid analyzer (Dionex). Glucose concentration in the culture solution was quantified using a reagent for quantifying glucose (Kyowa Medex Co., Ltd.). The results are shown in Table 6.

TABLE 6

| | Amount of strain at the | |
|---|---|---|
| | completion of culture | Amount of accumulated |
| Strain name | (0D660 nm) | threonin (g/l) |
| W3110redT | 19.3 | 4.4 |
| Step2T | 19.5 | 2.2 |
| Step4T | 19.6 | 4.8 |
| Step6T | 20.2 | 5.7 |
| Step8T | 20.3 | 3.2 |
| Step10T | 22.3 | 7.7 |
| Step12T | 22.3 | 10.5 |
| Step14T | 24.3 | 9.5 |
| Step16T | 24.2 | 10.2 |
| Step18γT | 25.0 | 8.8 |
| Step20T | 24.1 | 6.1 |
| Step22T | 24.7 | 11.4 |
| Step24T | 23.5 | 11.2 |
| Step26T | 23.6 | 10.1 |
| Step28T | 23.3 | 10.6 |

[0600] As is apparent from Table 6, the Step10 strain and the strains thereafter with the total length of chromosomal DNA deletion which exceeds 470 kb, in which the threonine biosynthetic gene has been reinforced, exhibits significant increase in the amount of threonine accumulated, as compared with a strain (W3110redT) in which the threonine biosynthetic gene of a strain comprising chromosomal DNA without deletions has been reinforced. Also, increase in the amount of threonine accumulated is equivalent to or higher than increase in cell mass increased. Accordingly, a mutant strain of E. coli comprising chromosomal DNA that is at least 470 kb shorter than that of a wild-type E. coli strain is useful as a host cell for substance production.

### EXAMPLE 9

[0601] Production of Substances using Mutant Strain of E. coli Comprising Chromosomal DNA with Multiple Partial Deletions 2

[0602] Glutathione is a peptidic substance comprising 3 types of amino acids, i.e., glutamic acid, cysteine, and glycine. The 3 aforementioned amino acids are condensed by the actions of γ-glutamyl cysteine synthetase and glutathione synthetase and glutathione is biosynthesized. ATP is a coenzyme that is indispensable for this condensation. Hereafter, the E. coli mutant strain of the present invention is used as an ATP source to produce glutathione.
[0603] (1) Obtaining of Glutathione Synthetase Gene

[0604] Plasmid DNA comprising the glutathione synthetase gene used in the experiment below was extracted from FERM BP-337 (Japanese Published Unexamined Patent Application No. 31690/90 (1990)).

[0605] Plasmid DNA comprising the glutathione synthetase gene can also be obtained in the following manner.

[0606] Specifically, in accordance with the methods described in Japanese Published Unexamined Patent Application No. 20196/83(1983) and J. Gen. Microbiol., 128, 1047-1052, 1982, the E. coli B strains were subjected to mutation by N-methyl-N′-nitrosoguanidine, mutants with attenuated glutathione synthesis were obtained, C912 was subjected to the same mutation, mutants with restored glutathione synthesis were obtained, and mutants in which γ-glutamyl cysteine synthetase inhibition by glutathione had been released are selected among therefrom (hereafter referred to as “inhibition-released strains”).

[0607] Subsequently, in accordance with the methods described in Japanese Published Unexamined Patent Application No. 31690/90 (1990) and Appl. Environ. Microbiol., 44, 1444-1448, 1982, the γ-glutamyl cysteine synthetase genes on the chromosome of the inhibition-released strain obtained by the above method were cloned into plasmid pBR322. Further, in accordance with the methods described in Japanese Published Unexamined Patent Application No. 31690/90(1990) and Agric. Biol. Chem., 47, 1381-1383, 1983, the glutathione synthetase genes on the chromosome of the inhibition-released strains were cloned into plasmid pBR322.

[0608] Subsequently, in accordance with the methods described in Japanese Published Unexamined Patent Publication No. 31690/90 (1990) and Bioprocess Technol., 19, 159-183, 1994, the 2 above cloned fragments were accumulated in the vector plasmid pBR325. Thus, pBR325-gshI.II disclosed in Japanese Published Unexamined Patent Application No. 31690/90(1990) or plasmid DNA having a glutathione synthetase gene equivalent to that of the former plasmid DNA can be constructed.

[0609] The pBR325-gshI.II obtained by the above method (hereafter referred to as “pGS600”) was used to transform the E. coli C600 strain by the calcium chloride method. The transformant was selected using an LBcm plate containing 20 μg/ml of chloramphenicol and designated as E. coli C600/pGS600.

[0610] The E. coli C600/pGS600 strain was subjected to shaking culture using 5 ml of LB liquid medium containing 3% glucose (LBG medium) at 30° C. for 24 hours. Subsequently, 4 ml of the resulting culture product was introduced into a conical flask containing 400 ml of fresh LBG medium and the culture product was subjected to shaking culture at 30° C. for 24 hours. The resulting culture product was centrifuged to precipitate cells, and the cells were washed twice with 100 ml of 100 mmol/l Tris-HCl buffer (0° C., pH 7.4).

[0611] The washed cells were stored at −80° C., the cells were dissolved with the addition of 10 ml of 100 mmol/l Tris-HCl buffer (pH 7.4) immediately before use, and the resultant was used as an enzyme solution.
[0612] (2) Obtaining of E. coli W3110red Cell Strain and Step28 Cell Strain

[0613] The W3110red strains and the Step28 strains were each independently subjected to shaking culture using 2.5 ml of LB liquid medium containing 3% glucose (LBG medium) at 30° C. for 24 hours, and 200 μl of the resulting culture product was introduced into a conical flask containing 20 ml of fresh LBG medium, followed by shaking culture at 30° C. for 24 hours. Table 7 shows turbidity (OD 660 um) measured upon completion of culture.

[0614] The resulting culture products were centrifuged to precipitate cells, and the cells were washed twice with 5 ml of 100 mmol/l Tris-HCl buffer (0° C., pH 7.4).

[0615] To the resulting washed cells, 200 μl of a GT solution (20% glucose and 0.4% Triton X100) was added, and the resulting solution of cells was used as an ATP source.
[0616] (3) Production of Glutathione

[0617] To 900 μl of a reaction solution (2% glucose, 20 mmol/l of magnesium sulfate, 20 mmol/l of dipotassium sulfate, 0.22 mmol/l of oxidized nicotinamide adenine dinucleotide, 0.14 mmol/l of flavin mononucleotide, 5 mmol/l of glutamic acid, 5 mmol/l of cysteine, 5 mmol/l of glycine, 0.4% Triton X-100, 15 mmol/l of monopotassium phosphate, and 200 mmol/l of MOPS buffer; pH 7.8), 100 tl of the enzyme solution obtained in (1) above and 100 μl of the solution of the E. coli W3110red strains or Step28 strains obtained in (2) above were added, and the reaction was allowed to proceed while shaking culture was performed at 30° C. for 90 minutes.

[0618] Glutathione that had been accumulated in the reaction solution was quantified using a glutathione quantification kit (Dojindo Laboratories). The results are shown in Table 7.

TABLE 7

| | Amount of strain at the | |
|---|---|---|
| | completion of culture | Amount of accumulated |
| Strain name | (turbidity 0D60 nm) | glutathione (mmol/l) |
| W3110red | 2.2 | 0.18 |
| Step28 | 3.6 | 1.19 |

[0619] As shown in Table 7, the cell mass of the Step28 strains, which were subjected to the reaction as ATP sources and were mutants of E. coli strains having chromosomal DNA with multiple partial deletions, were 1.6 times (i.e., 3.6/2.2) those of the E. coli W3110red strains having chromosomal DNA without deletions; however, the figure for the amount of glutathione accumulated was 6.6 times (i.e., 1. 19/0.18).

[0620] The E. coli mutant strain according to the present invention exhibits a higher activity for producing ATP per cell, i.e., a higher activity for reproducing ATP, than its parental strain, the E. coli W3110red strain without chromosomal DNA deletions. Therefore, the E. coli mutant strain according to the present invention was found to be useful for producing useful substances that require ATP in their biosynthetic pathways.

Industrial Applicability

[0621] Use of the E. coli mutant strain of the present invention as a host cell enables effective production of useful substances.

Free Text of the Sequence Listing

[0622] SEQ ID NO: 2 Explanation of Artificial sequence: synthesized DNA
[0623] SEQ ID NO: 3 Explanation of Artificial sequence: synthesized DNA
[0624] SEQ ID NO: 4 Explanation of Artificial sequence: synthesized DNA
[0625] SEQ ID NO: 5 Explanation of Artificial sequence: synthesized DNA
[0626] SEQ ID NO: 6 Explanation of Artificial sequence: synthesized DNA
[0627] SEQ ID NO: 7 Explanation of Artificial sequence: synthesized DNA
[0628] SEQ ID NO: 8 Explanation of Artificial sequence: synthesized DNA
[0629] SEQ ID NO: 9 Explanation of Artificial sequence: synthesized DNA
[0630] SEQ ID NO: 10 Explanation of Artificial sequence: synthesized DNA
[0631] SEQ ID NO: 11 Explanation of Artificial sequence: synthesized DNA
[0632] SEQ ID NO: 12 Explanation of Artificial sequence: synthesized DNA
[0633] SEQ ID NO: 13 Explanation of Artificial sequence: synthesized DNA
[0634] SEQ ID NO: 14 Explanation of Artificial sequence: synthesized DNA
[0635] SEQ ID NO: 15 Explanation of Artificial sequence: synthesized DNA
[0636] SEQ ID NO: 16 Explanation of Artificial sequence: synthesized DNA
[0637] SEQ ID NO: 17 Explanation of Artificial sequence: synthesized DNA
[0638] SEQ ID NO: 18 Explanation of Artificial sequence: synthesized DNA
[0639] SEQ ID NO: 19 Explanation of Artificial sequence: synthesized DNA
[0640] SEQ ID NO: 20 Explanation of Artificial sequence: synthesized DNA
[0641] SEQ ID NO: 21 Explanation of Artificial sequence: synthesized DNA
[0642] SEQ ID NO: 22 Explanation of Artificial sequence: synthesized DNA
[0643] SEQ ID NO: 23 Explanation of Artificial sequence: synthesized DNA
[0644] SEQ ID NO: 24 Explanation of Artificial sequence: synthesized DNA
[0645] SEQ ID NO: 25 Explanation of Artificial sequence: synthesized DNA
[0646] SEQ ID NO: 26 Explanation of Artificial sequence: synthesized DNA
[0647] SEQ ID NO: 27 Explanation of Artificial sequence: synthesized DNA
[0648] SEQ ID NO: 28 Explanation of Artificial sequence: synthesized DNA
[0649] SEQ ID NO: 29 Explanation of Artificial sequence: synthesized DNA
[0650] SEQ ID NO: 30 Explanation of Artificial sequence: synthesized DNA
[0651] SEQ ID NO: 31 Explanation of Artificial sequence: synthesized DNA

1. An E. coli mutant strain comprising the following genes [1] and [2] or homologous genes thereof and comprising chromosomal DNA that is at least 470 kbp shorter than that of a wild-type E. coli strain, provided that when the following genes [1] and [2] or homologous genes thereof are not found in wild-type E. coli strains (“NC genes”), the E. coli mutant strain does not contain the NC gene.
[1] thrA gene, thrB gene, thrc gene, talB gene, mog gene, htgA gene, dnaK gene, dnaJ gene, hokC gene, nhaA gene, nhaR gene, rpsT gene, ribF gene, ileS gene, lspA gene, fkpB gene, lytB gene, dapB gene, carA gene, carB gene, caiF gene, caie gene, caiD gene, caiC gene, caiB gene, caiA gene, caiT gene, fixA gene, fixB gene, fixC gene, fixX gene, kefC gene, folA gene, apaH gene, apaG gene, ksgA gene, pdxA gene, surA gene, imp gene, djlA gene, rluA gene, hepA gene, polB gene, araD gene, araA gene, araB gene, araC gene, tbpA gene, leuD gene, leuC gene, leuB gene, leuA gene, leuL gene, leuO gene, ilvI gene, ilvH gene, fruR gene, ftsL gene, ftsl gene, murE gene, murF gene, mraY gene, murD gene, ftsW gene, murG gene, murC gene, ddlB gene, ftsQ gene, ftsA gene, ftsZ gene, lpxC gene, secA gene, mutT gene, yacE gene, guaC gene, hofC gene, hofB gene, ppdD gene, nadC gene, ampD gene, ampE gene, aroP gene, pdhR gene, aceE gene, aceF gene, lpdA gene, acnB gene, speD gene, speE gene, gcd gene, hpt gene, yadF gene, panD gene, panC gene, panB gene, htrE gene, ecpD gene, folK gene, pcnB gene, dksA gene, sfsA gene, ligT gene, hrpB gene, ponB gene, hemL gene, pfs gene, dgt gene, htrA gene, dapD gene, glnD gene, map gene, rpsB gene, tsf gene, smb gene, rrf gene, dxr gene, rth gene, cdsA gene, yaeL gene, hlpA gene, lpxD gene, fabZ gene, lpxA gene, lpxB gene, rnhB gene, dnaE gene, accA gene, ldcC gene, mesJ gene, rof gene, cutF gene, proS gene, rcsF gene, abc gene, dniR gene, gloB gene, mhA gene, dnaQ gene, up18 gene, gmhA gene, pepD gene, gpt gene, crl gene, phoE gene, proB gene, proA gene, hemB gene, proC gene, aroL gene, aroM gene, araJ gene, sbcC gene, sbcD gene, phoB gene, phoR gene, brnQ gene, proY gene, malZ gene, queA gene, tgt gene, secD gene, secF gene, tsx gene, ribD gene, ribH gene, nusB gene, thiL gene, pgpA gene, dxs gene, ispA gene, xseB gene, thiI gene, thiJ gene, apbA gene, cyoE gene, cyoD gene, cyoC gene, cyoB gene, cyoA gene, ampG gene, bolA gene, tig gene, clpP gene, clpX gene, lon gene, hupB gene, cof gene, mdlA gene, mdlB gene, glnK gene, amtB gene, tesB gene, maa gene, hha gene, acrB gene, acrA gene, acrR gene, aefA gene, priC gene, apt gene, dnaX gene, recR gene, htpG gene, adk gene, hemH gene, aes gene, gsk gene, fsr gene, ushA gene, cueR gene, gcl gene, gip gene, purK gene, purE gene, ybbF gene, ppiB gene, cysS gene, folD gene, sfmA gene, sfmC gene, sfmD gene, sfmH gene, sfmF gene, fimZ gene, entD gene, fepA gene, fes gene, entF gene, fepE gene, fepC gene, fepG gene, fepD gene, fepB gene, entC gene, entE gene, entB gene, entA gene, cstA gene, dsbG gene, ahpC gene, ahpF gene, rnk gene, ma gene, citT gene, citG gene, citX gene, citF gene, citE gene, citD gene, citC gene, citA gene, citB gene, dcuC gene, dcuC gene, crcA gene, cspE gene, crcB gene, lipA gene, lipB gene, dacA gene, ripA gene, mrdB gene, mrdA gene, phpB gene, nadD gene, holA gene, rlpB gene, leuS gene, lnt gene, phoL gene, ubiF gene, asnB gene, nagD gene, nagC gene, nagA gene, nagB gene, nagE gene, glnS gene, fur gene, fldA gene, seqA gene, pgm gene, potE gene, speF gene, kdpE gene, kdpD gene, kdpC gene, kdpB gene, kdpA gene, phrB gene, end8 gene, abrB gene, gltA gene, sdhC gene, sdhD gene, sdhA gene, sdhB gene, sucA gene, sucB gene, sucC gene, sucD gene, farR gene, hrsA gene, cydA gene, cydB gene, tolQ gene, tolR gene, tolA gene, tolB gene, pal gene, nadA gene, pnuC gene, czcD gene, aroG gene, gpmA gene, galM gene, galK gene, galT gene, galE gene, modF gene, modE gene, modA gene, modB gene, modC gene, bioA gene, bioB gene, bioF gene, bioC gene, bioD gene, uvrB gene, moaA gene, moaB gene, moaC gene, moaD gene, moaE gene, rhlE gene, dps gene, ompX gene, mipB gene, moeB gene, moeA gene, mdfA gene, grxA gene, poxB gene, aqpZ gene, cspD gene, clpA gene, infA gene, aat gene, cydC gene, cydD gene, trxB gene, lrp gene, ftsK gene, lolA gene, serS gene, dmsA gene, dmsB gene, dmsC gene, pflA gene, pflB gene, focA gene, serC gene, aroA gene, cmk gene, rpsA gene, himD gene, msbA gene, lpxK gene, kdsB gene, smtA gene, mukF gene, kicA gene, mukB gene, aspC gene, ompF gene, asnS gene, pncB gene, pepN gene, ssuB gene, ssuC gene, ssuD gene, ssuA gene, ssuE gene, pyrD gene, uup gene, pqiA gene, pqiB gene, rmf gene, fabA gene, ompA gene, sulA gene, helD gene, mgsA gene, acyP gene, hyaA gene, hyaB gene, hyaC gene, hyaD gene, hyaE gene, hyaF gene, appC gene, appB gene, appA gene, csgG gene, csgF gene, csgE gene, csgD gene, csgB gene, csgA gene, csgC gene, sfaA gene, mdoG gene, mdoH gene, msyB gene, htrB gene, solA gene, dinI gene, pyrC gene, grxB gene, rimJ gene, mviM gene, mviN gene, flgN gene, flgM gene, flgA gene, flgB gene, flgC gene, flgD gene, flgE gene, flgF gene, flgG gene, flgH gene, flgI gene, flgJ gene, flgK gene, flgL gene, me gene, riuC gene, rpmF gene, plsX gene, fabH gene, fabD gene, fabG gene, acpP gene, fabF gene, pabC gene, tmk gene, holB gene, ptsG gene, fhuE gene, nagZ gene, ndh gene, mfd gene, ycfU gene, ycfV gene, ycfW gene, cobB gene, potD gene, potC gene, potB gene, potA gene, pepT gene, phoQ gene, phoP gene, purB gene, trmU gene, icdA gene, minE gene, minD gene, minC gene, clyA gene, umuD gene, umuC gene, dsbB gene, nhaB gene, fadR gene, dadA gene, dadX gene, ldcA gene, mltE gene, tagl gene, treA gene, dhaR gene, pth gene, prsA gene, ychB gene, hemM gene, hemA gene, prfA gene, hemK gene, kdsA gene, chaA gene, chaB gene, chaC gene, narL gene, narX gene, narK gene, narG gene, narH gene, narJ gene, narI gene, tpr gene, purU gene, sprE gene, galU gene, hns gene, tdk gene, adhE gene, oppA gene, oppB gene, oppC gene, oppD gene, oppF gene, cls gene, kch gene, tonB gene, trpA gene, trpB gene, trpC gene, trpD gene, trpE gene, trpL gene, btuR gene, sohB gene, topA gene, cysB gene, acnA gene, ribA gene, pgpB gene, pyrF gene, osmB gene, mb gene, envM gene, sapF gene, sapD gene, sapC gene, sapB gene, sapA gene, aldH gene, ordL gene, goaG gene, pspF gene, pspA gene, pspB gene, pspC gene, pspD gene, pspE gene, sucP gene, ompG gene, tyrR gene, tpx gene, mppA gene, fnr gene, ogt gene, dbpA gene, intR gene, lar gene, recT gene, recE gene, racC gene, kil gene, sieB gene, racR gene, dnaC gene, enpP gene, trkG gene, VMTH_LAMBD gene, VLOM_LAMBD gene, tnpO gene, upo3 gene, ompN gene, nifJ gene, hslJ gene, ldhA gene, feaR gene, feaB gene, tynA gene, paaZ gene, paaA gene, paaB gene, paaC gene, paaD gene, paaE gene, paaF gene, paaG gene, paaH gene, paaI gene, paaJ gene, paaK gene, paaX gene, paaY gene, acpD gene, hrpA gene, aldA gene, gapC gene, gapC gene, cybB gene, trg gene, rimL gene, tehA gene, tehB gene, prtC gene, potA gene, potC gene, ansP gene, nhoA gene, narV gene, narW gene, narY gene, narZ gene, narU gene, fdnG gene, fdnH gene, fdnI gene, adhP gene, sfcA gene, rpsV gene, osmC gene, dos gene, xasA gene, gadB gene, pqqL gene, chuR gene, hipA gene, hipB gene, tam gene, uxaB gene, marC gene, marR gene, marA gene, marB gene, dcp gene, lycV gene, dicA gene, dicB gene, rspB gene, rspA gene, speG gene, dmsB gene, dmsC gene, bioD gene, mlc gene, asr gene, ebr gene, pntB gene, pntA gene, arcD gene, rstA gene, rstB gene, tus gene, fumC gene, fumA gene, manA gene, uidC gene, uidB gene, uidA gene, uidR gene, hdhA gene, malI gene, malX gene, malY gene, add gene, blr gene, nth gene, gst gene, pdxY gene, tyrS gene, pdxH gene, slyB gene, slyA gene, sodC gene, nemA gene, gloA gene, mt gene, lhr gene, sodB gene, araJ gene, purR gene, cfa gene, ribE gene, ag43 gene, phsC gene, nrfC gene, pykF gene, lpp gene, sufS gene, aroD gene, ppsA gene, aroH gene, nlpC gene, btuD gene, btuE gene, btuC gene, himA gene, pheT gene, pheS gene, pheM gene, rplT gene, rpmI gene, infC gene, thrS gene, arp gene, pfkB gene, cedA gene, katE gene, celF gene, celD gene, celC gene, celB gene, celA gene, osmE gene, nadE gene, spy gene, astE gene, astB gene, astD gene, astA gene, cstC gene, xthA gene, gdhA gene, topB gene, selD gene, sppA gene, ansA gene, tdh gene, gapA gene, ttuC gene, caiT gene, rnd gene, fadD gene, slp gene, pabB gene, sdaA gene, manX gene, manY gene, manZ gene, rrmA gene, cspC gene, kdgR gene, tcmA gene, htpX gene, prc gene, pqiB gene, pphA gene, holE gene, exoX gene, ptrB gene, purT gene, eda gene, edd gene, zwf gene, pykA gene, mlt gene, znuA gene, znuC gene, ruvB gene, ruvA gene, ruvC gene, ntpA gene, aspS gene, bisZ gene, torY gene, cutC gene, argS gene, pgsA gene, amn gene, cbl gene, nac gene, erfK gene, cobT gene, cobS gene, cobU gene, gyrI gene, phsE gene, sbcB gene, hisL gene, hisG gene, hisD gene, hisC gene, hisB gene, hisH gene, hisA gene, hisF gene, hisI gene, wzz gene, ugd gene, gnd gene, galF gene, wcaM gene, wcaL gene, wcaK gene, wzxC gene, wcaJ gene, cpsG gene, cpsB gene, wcaI gene, wcaH gene, wcaG gene, gmd gene, wcaF gene, wcaE gene, wcaD gene, wcaC gene, wcaB gene, wcaA gene, wzb gene, wza gene, asmA gene, dcd gene, udk gene, thiD gene, thiM gene, mrp gene, metG gene, cdd gene, sanA gene, mglC gene, mglA gene, mglB gene, galS gene, folE gene, cirA gene, lysP gene, nfo gene, fruA gene, fruK gene, fruB gene, rplY gene, narP gene, ccmH gene, dsbE gene, ccmF gene, ccmE gene, ccmD gene, ccmC gene, ccmB gene, ccmA gene, napC gene, napB gene, napH gene, napG gene, napA gene, napD gene, napF gene, eco gene, alkB gene, ada gene, apbE gene, rcsB gene, rcsC gene, atoS gene, atoC gene, atoD gene, atoA gene, atoE gene, atoB gene, gyrA gene, ubiG gene, nrdA gene, nrdB gene, inaA gene, glpQ gene, glpT gene, glpA gene, glpB gene, glpC gene, cinA gene, ais gene, pmrD gene, menE gene, menC gene, menB gene, menD gene, menF gene, nuoN gene, nuoM gene, nuoL gene, nuoK gene, nuoJ gene, nuoI gene, nuoH gene, nuoG gene, nuoF gene, nuoE gene, nuoD gene, nuoB gene, nuoA gene, lrhA gene, ackA gene, pta gene, ubiX gene, purF gene, dedE gene, dedD gene, folC gene, accD gene, dedA gene, truA gene, usg1 gene, pdxB gene, div gene, fabB gene, ddpX gene, mepA gene, aroC gene, sixA gene, fadL gene, vacJ gene, dsdC gene, dsdX gene, dsdA gene, emrY gene, emrK gene, evgA gene, evgS gene, bifF gene, ddg gene, glk gene, mntH gene, nupC gene, gltX gene, xapR gene, xapB gene, xapA gene, lig gene, zipA gene, cysZ gene, cysK gene, ptsH gene, ptsI gene, gsr gene, pdxK gene, cysM gene, cysA gene, cysW gene, cysU gene, cysP gene, ucpA gene, ptbA gene, amiA gene, hemF gene, cchA gene, eutC gene, eutB gene, eutH gene, eutG gene, eutJ gene, eutE gene, cchB gene, eutI gene, talA gene, tktB gene, aegA gene, narQ gene, acrD gene, dapE gene, purC gene, nlpB gene, dapA gene, gcvR gene, bcp gene, hyfA gene, hyfB gene, hyfC gene, hyfD gene, hyfE gene, hyfF gene, hyfG gene, hyfH gene, hyfI gene, hyfJ gene, hyfR gene, focB gene, perM gene, yfgE gene, uraA gene, upp gene, purM gene, purN gene, ppk gene, ppx gene, guaA gene, guaB gene, xseA gene, hisS gene, gcpE gene, ndk gene, pbpC gene, sseA gene, sseB gene, pepB gene, fdx gene, hscA gene, hscB gene, iscU gene, iscS gene, iscR gene, suhB gene, csiE gene, dgxA gene, dgxB gene, hcaC gene, hcaB gene, hcaD gene, glyA gene, hmpA gene, glnB gene, purL gene, acpS gene, pdxJ gene, recO gene, era gene, rnc gene, lepB gene, lepA gene, rseC gene, rseB gene, rseA gene, rpoE gene, nadB gene, srmB gene, ung gene, trx2 gene, pssA gene, kgtP gene, clpB gene, rluD gene, pheL gene, pheA gene, tyrA gene, aroF gene, rplS gene, trmD gene, rimM gene, rpsP gene, ffh gene, grpE gene, recN gene, smpA gene, smpB gene, gabD gene, gabT gene, gabP gene, nrdF gene, emrR gene, emrA gene, emrB gene, gshA gene, csrA gene, alaS gene, oraA gene, recA gene, mltB gene, hypF gene, hydN gene, ascG gene, ascF gene, ascB gene, hyc gene, hycH gene, hycG gene, hycF gene, hycE gene, hycD gene, hycC gene, hycB gene, hycA gene, hypA gene, hypB gene, hypC gene, hypD gene, hypE gene, fhlA gene, mutS gene, prpB gene, rpoS gene, pcm gene, surE gene, ygbB gene, ygbP gene, ygbQ gene, cysC gene, cysN gene, cysD gene, iap gene, cysH gene, cysI gene, cysJ gene, ptpS gene, eno gene, pyrG gene, mazG gene, chpR gene, relA gene, barA gene, gud2 gene, gudT gene, mioC gene, syd gene, sdaB gene, exo gene, fucO gene, fucA gene, fucP gene, fuc gene, fucK gene, fucU gene, fucR gene, gcvA gene, nifS gene, mltA gene, amiC gene, argA gene, thyA gene, lgt gene, ptsP gene, mutH gene, tas gene, aas gene, galR gene, lysA gene, lysR gene, araE gene, kduD gene, kduI gene, lysS gene, prfB gene, recJ gene, dsbC gene, xerD gene, fldB gene, upl4 gene, bglA gene, gcvP gene, gcvH gene, gcvT gene, visC gene, ubiH gene, pepP gene, serA gene, rpiA gene, iciA gene, sbm gene, argK gene, fba gene, pgk gene, epd gene, tktA gene, speB gene, speA gene, metK gene, galP gene, sprT gene, endA gene, gshB gene, yqgF gene, ansB gene, mutY gene, mltC gene, nupG gene, speC gene, pitB gene, gsp gene, hybG gene, hybF gene, hybE gene, hybD gene, hybC gene, hybB gene, hybA gene, hoxK gene, exbD gene, exbB gene, metC gene, exsA gene, sufI gene, plsC gene, parC gene, parE gene, icc gene, tolC gene, ribB gene, glgS gene, rfaE gene, glnE gene, cca gene, bacA gene, folB gene, ttdA gene, ttdB gene, ygjD gene, rpsU gene, dnaG gene, rpoD gene, aer gene, ebgR gene, ebgA gene, ebgC gene, fadH gene, uxaA gene, uxaC gene, exuT gene, exuR gene, tdcE gene, tdcD gene, tdcC gene, tdcB gene, tdcA gene, tdcR gene, sohA gene, agaR gene, agaZ gene, agaV gene, agaW gene, agaA gene, agaS gene, agaY gene, agaB gene, agaC gene, agaD gene, agaI gene, mtr gene, deaD gene, nlpI gene, pnp gene, rpsO gene, truB gene, rbfA gene, infB gene, nusA gene, argG gene, secG gene, mrsA gene, folP gene, ftsH gene, ftsJ gene, greA gene, dacB gene, yhbZ gene, rpmA gene, rplU gene, ispB gene, nlp gene, murA gene, yrbI gene, yrbK gene, rpoN gene, ptsN gene, ptsO gene, mtgA gene, arcB gene, gltB gene, nanT gene, npl gene, nanR gene, dcuD gene, sspB gene, sspA gene, rpsI gene, rplM gene, hhoA gene, hhoB gene, mdh gene, argR gene, tldD gene, mg gene, mreD gene, mreC gene, mreB gene, accB gene, accC gene, panF gene, prmA gene, fis gene, aroE gene, smg gene, smf gene, def gene, fmt gene, sun gene, trkA gene, mscL gene, zntR gene, rplQ gene, rpoA gene, rpsD gene, rpsK gene, rpsM gene, rpmJ gene, secY gene, rplO gene, rpmD gene, rpsE gene, rplR gene, rplF gene, rpsH gene, rpsN gene, rplE gene, rplX gene, rplN gene, rpsQ gene, rpmC gene, rplP gene, rpsC gene, rplV gene, rpsS gene, rplB gene, rplW gene, rplD gene, rplC gene, rpsJ gene, tufA gene, fusA gene, rpsG gene, rpsL gene, fkpA gene, slyX gene, slyD gene, kefB gene, prkB gene, crp gene, argD gene, pabA gene, fic gene, ppiA gene, nirB gene, nirD gene, nirC gene, cysG gene, php gene, trpS gene, gph gene, rpe gene, dam gene, damX gene, aroB gene, aroK gene, hofQ gene, mrcA gene, pckA gene, envZ gene, ompR gene, greB gene, feoA gene, feoB gene, bioH gene, gntT gene, malQ gene, malP gene, malT gene, rtcA gene, rtcB gene, rtcR gene, glpR gene, glpG gene, glpE gene, glpD gene, glgP gene, glgA gene, glgC gene, glgX gene, glgB gene, asd gene, gntU gene, gntU gene, gntK gene, gntR gene, ggt gene, ugpQ gene, ugpC gene, ugpE gene, ugpA gene, ugpB gene, livF gene, livG gene, livM gene, livH gene, livK gene, livJ gene, rpoH gene, ftsX gene, ftsE gene, ftsY gene, atzN gene, nikA gene, nikB gene, nikC gene, nikD gene, nikE gene, pitA gene, uspB gene, uspA gene, prlC gene, gor gene, arsR gene, arsB gene, arsC gene, slp gene, hdeB gene, hdeA gene, hdeD gene, gadA gene, treF gene, kdgK gene, dctA gene, dppF gene, dppD gene, dppC gene, dppB gene, dppA gene, tag gene, bisC gene, cspA gene, glyS gene, glyQ gene, xylB gene, xylA gene, xylF gene, xylG gene, xylH gene, xylR gene, bax gene, malS gene, avtA gene, lyx gene, sgbH gene, sgbU gene, sgbE gene, aldB gene, selB gene, selA gene, mtlA gene, mtlD gene, mtlR gene, lldP gene, lldR gene, lldD gene, cysE gene, gpsA gene, secB gene, grxC gene, tdh gene, kbl gene, htrL gene, rfaD gene, rfaF gene, rfaC gene, rfaL gene, rfaK gene, rfaZ gene, rfaY gene, rfaJ gene, rfaI gene, rfaB gene, rfaS gene, rfaP gene, rfaG gene, rfaQ gene, kdtA gene, kdtB gene, mutM gene, rpmG gene, rpmB gene, radC gene, dfp gene, dut gene, ttk gene, pyrE gene, rph gene, dinD gene, gmk gene, rpoZ gene, spoT gene, spoU gene, recG gene, gltS gene, nlpA gene, uhpT gene, uhpC gene, uhpB gene, uhpA gene, ilvN gene, ilvB gene, ivbL gene, emrD gene, ibpB gene, ibpA gene, gyrB gene, recF gene, dnaN gene, dnaA gene, rpmH gene, rnpA gene, yidC gene, thdF gene, tnaL gene, tnaA gene, tnaB gene, bglB gene, bglF gene, bglG gene, phoU gene, pstB gene, pstA gene, pstC gene, pstS gene, glmS gene, glmU gene, atpC gene, uncD gene, atpG gene, atpA gene, atpH gene, atpF gene, atpE gene, atpB gene, atpI gene, gidB gene, gidA gene, mioC gene, asnC gene, pssR gene, ilvL gene, ilvG gene, ilvM gene, ilvE gene, ilvD gene, ilvA gene, ilvY gene, ilvC gene, ppiC gene, rep gene, gppA gene, rhlB gene, trxA gene, rhoL gene, rho gene, rfe gene, wzzE gene, nfrC gene, rffD gene, rffG gene, rffH gene, rffA gene, wzxE gene, rffT gene, wecG gene, aslB gene, aslA gene, hemY gene, hemX gene, hemD gene, hemC gene, cyaA gene, cyaY gene, dapF gene, xerC gene, uvrD gene, corA gene, radD gene, pldA gene, recQ gene, pldB gene, metR gene, metE gene, udp gene, ubiE gene, aarF gene, tatC gene, tatD gene, rfaH gene, ubiD gene, ubiB gene, fadA gene, fadB gene, pepQ gene, trkH gene, trkH gene, hemG gene, mobB gene, mobA gene, dsbA gene, polA gene, yihA gene, hemN gene, ntrC gene, ntrB gene, glnA gene, fdhE gene, fdoI gene, fdoH gene, fdoG gene, fdhD gene, sodA gene, kdgT gene, cpxA gene, cpxR gene, cpxP gene, pfkA gene, sbp gene, cdh gene, tpiA gene, fpr gene, glpX gene, glpK gene, glpF gene, menG gene, menA gene, hslU gene, hslV gene, ftsN gene, cytR gene, priA gene, rpmE gene, metJ gene, metB gene, metL gene, metF gene, katG gene, gldA gene, talC gene, ppc gene, argE gene, argC gene, argB gene, argH gene, oxyR gene, udhA gene, trmA gene, btuB gene, murI gene, murB gene, birA gene, coaA gene, tufB gene, secE gene, nusG gene, rplK gene, rplA gene, rplJ gene, rplL gene, rpoB gene, rpoC gene, htrC gene, thiH gene, thiG gene, thiS gene, thiF gene, thiE gene, thiC gene, rsd gene, hemE gene, nfi gene, hupA gene, hydH gene, hydG gene, purD gene, purH gene, metA gene, aceB gene, aceA gene, aceK gene, arp gene, iclR gene, metH gene, pepE gene, lysC gene, pgi gene, ubiC gene, ubiA gene, plsB gene, dgkA gene, lexA gene, dinF gene, qor gene, dnaB gene, alr gene, tyrB gene, napA gene, hobH gene, uvrA gene, ssb gene, soxS gene, soxR gene, acs gene, nrfA gene, nrfB gene, nrfC gene, nrflD gene, nrfE gene, nrfF gene, nrfG gene, gltP gene, fdhF gene, alsR gene, rpiB gene, proP gene, basS gene, basR gene, adiY gene, adi gene, melR gene, melA gene, melB gene, fumB gene, dcuB gene, dcuR gene, dcuS gene, lysU gene, cadA gene, cadB gene, cadC gene, cutA3 gene, cutA2 gene, cutA gene, dcuA gene, aspA gene, fxsA gene, groES gene, groEL gene, efp gene, ecnB gene, sugE gene, blc gene, ampC gene, frdD gene, frdC gene, frdB gene, frdA gene, genX gene, psd gene, yjeQ gene, yjeE gene, amiB gene, mutL gene, miaA gene, hfq gene, hflX gene, hflK gene, hflC gene, purA gene, vacB gene, sgaE gene, rpsF gene, priB gene, rpsR gene, rplI gene, fklB gene, cycA gene, cpdB gene, cysQ gene, msrA gene, chpS gene, chpB gene, ppa gene, fbp gene, mpl gene, pmbA gene, cybC gene, nrdG gene, nrdD gene, treC gene, treB gene, treR gene, mgtA gene, pyrI gene, pyrB gene, pyrBI gene, argI gene, valS gene, holC gene, xerB gene, idnR gene, idnT gene, idnO gene, idnD gene, idnK gene, fecE gene, fecD gene, fecC gene, fecB gene, fecA gene, fecR gene, fecI gene, dnaC gene, dnaT gene, bglJ gene, fluF gene, rsmC gene, holD gene, rimI gene, prfC gene, osmY gene, deoC gene, deoA gene, deoB gene, deoD gene, lplA gene, smp gene, serB gene, radA gene, nadR gene, slt gene, trpR gene, gpmG gene, rob gene, creA gene, creB gene, creC gene, creD gene, arcA gene, lasT gene, thrL gene;
[2] acrE gene, argT gene, artI gene, artJ gene, artM gene, artP gene, artQ gene, bfr gene, chiA gene, chpA gene, dacC gene, deoR gene, dinG gene, elaA gene, elaB gene, elaC gene, elaD gene, envD gene, envR gene, fhuA gene, fhuB gene, fhuC gene, fhuD gene, folX gene, glnH gene, glnP gene, glnQ gene, gltJ gene, gltK gene, gltL gene, gspA gene, gspC gene, gspD gene, gspE gene, gspI gene, gspJ gene, gspK gene, gspL gene, hisJ gene, hisM gene, hisP gene, hisQ gene, hofD gene, hofF gene, hofG gene, hofH gene, ltaA gene, mdaA gene, mdaB gene, pinO gene, potF gene, potG gene, potH gene, potI gene, pshM gene, ptwB gene, ptwC gene, rhsB gene, rimK gene, xylU gene.

2. The E. coli mutant strain according to claim 1 comprising chromosomal DNA that comprises DNA having the nucleotide sequences as shown in [1] to [69] below of SEQ ID NO: 1 or DNA equivalent thereto.
[1] a nucleotide sequence of nucleotides 1 to 167064
[2] a nucleotide sequence of nucleotides 172980 to 243964
[3] a nucleotide sequence of nucleotides 253411 to 261963
[4] a nucleotide sequence of nucleotides 387532 to 389138
[5] a nucleotide sequence of nucleotides 403704 to 518029
[6] a nucleotide sequence of nucleotides 532712 to 535504
[7] a nucleotide sequence of nucleotides 550216 to 563940
[8] a nucleotide sequence of nucleotides 608119 to 675103
[9] a nucleotide sequence of nucleotides 689375 to 728820
[10] a nucleotide sequence of nucleotides 739594 to 832551
[11] a nucleotide sequence of nucleotides 848090 to 867637
[12] a nucleotide sequence of nucleotides 883474 to 890997
[13] a nucleotide sequence of nucleotides 909380 to 1048887
[14] a nucleotide sequence of nucleotides 1097020 to 1198105
[15] a nucleotide sequence of nucleotides 1225147 to 1630911
[16] a nucleotide sequence of nucleotides 1641039 to 1642631
[17] a nucleotide sequence of nucleotides 1650223 to 1964523
[18] a nucleotide sequence of nucleotides 1993076 to 1996661
[19] a nucleotide sequence of nucleotides 2028210 to 2033448
[20] a nucleotide sequence of nucleotides 2044377 to 2069148
[21] a nucleotide sequence of nucleotides 2081927 to 2104392
[22] a nucleotide sequence of nucleotides 2116065 to 2146263
[23] a nucleotide sequence of nucleotides 2187856 to 2200668
[24] a nucleotide sequence of nucleotides 2229851 to 2255894
[25] a nucleotide sequence of nucleotides 2263492 to 2270439
[26] a nucleotide sequence of nucleotides 2286589 to 2386261
[27] a nucleotide sequence of nucleotides 2395472 to 2423364
[28] a nucleotide sequence of nucleotides 2434099 to 2472851
[29] a nucleotide sequence of nucleotides 2482483 to 2505074
[30] a nucleotide sequence of nucleotides 2514558 to 2755676
[31] a nucleotide sequence of nucleotides 2789481 to 2795173
[32] a nucleotide sequence of nucleotides 2800891 to 2804307
[33] a nucleotide sequence of nucleotides 2810148 to 2825313
[34] a nucleotide sequence of nucleotides 2830263 to 2910273
[35] a nucleotide sequence of nucleotides 2910574 to 2985361
[36] a nucleotide sequence of nucleotides 3033129 to 3077084
[37] a nucleotide sequence of nucleotides 3078917 to 3110109
[38] a nucleotide sequence of nucleotides 3134342 to 3165627
[39] a nucleotide sequence of nucleotides 3172941 to 3360736
[40] a nucleotide sequence of nucleotides 3370548 to 3411159
[41] a nucleotide sequence of nucleotides 3420879 to 3453020
[42] a nucleotide sequence of nucleotides 3469367 to 3618575
[43] a nucleotide sequence of nucleotides 3636917 to 3854661
[44] a nucleotide sequence of nucleotides 3865832 to 3867101
[45] a nucleotide sequence of nucleotides 3877011 to 3926658
[46] a nucleotide sequence of nucleotides 3938879 to 4059897
[47] a nucleotide sequence of nucleotides 4079660 to 4086450
[48] a nucleotide sequence of nucleotides 4099983 to 4139231
[49] a nucleotide sequence of nucleotides 4149710 to 4235358
[50] a nucleotide sequence of nucleotides 4251736 to 4298976
[51] a nucleotide sequence of nucleotides 4311512 to 4313317
[52] a nucleotide sequence of nucleotides 4329722 to 4409532
[53] a nucleotide sequence of nucleotides 4423152 to 4496201
[54] a nucleotide sequence of nucleotides 4509535 to 4517875
[55] a nucleotide sequence of nucleotides 4599638 to 4641433
[56] a nucleotide sequence of nucleotides 167065 to 172979
[57] a nucleotide sequence of nucleotides 675104 to 689374
[58] a nucleotide sequence of nucleotides 832552 to 848089
[59] a nucleotide sequence of nucleotides 867638 to 883473
[60] a nucleotide sequence of nucleotides 890998 to 909379
[61] a nucleotide sequence of nucleotides 2386262 to 2395471
[62] a nucleotide sequence of nucleotides 2423365 to 2434098
[63] a nucleotide sequence of nucleotides 2472852 to 2482482
[64] a nucleotide sequence of nucleotides 2505075 to 2514557
[65] a nucleotide sequence of nucleotides 2910274 to 2910573
[66] a nucleotide sequence of nucleotides 3165628 to 3172940
[67] a nucleotide sequence of nucleotides 3411160 to 3420878
[68] a nucleotide sequence of nucleotides 3453021 to 3469366
[69] a nucleotide sequence of nucleotides 3618576 to 3636916

3. The E. coli mutant strain according to claim 1 or 2 comprising chromosomal DNA that does not comprise yafJ gene, yafK gene, yafQ gene, dinJ gene, yafL gene, yafM gene, fhiA gene, lafU gene, dinP gene, yafN gene, yafO gene, yafP gene, JW0225 gene, prfH gene, ykfI gene, yafW gene, yeeT gene, ykfG gene, yafX gene, ykfF gene, ykfB gene, yafY gene, ypjK gene, yafZ gene, ykfA gene, perR gene, JW0245 gene, JW0246 gene, JW0247 gene, ykfC gene, JW0249 gene, is5B gene, yi51 gene, mmuP gene, mmuM gene, afuC gene, JW0255 gene, insB gene, insA gene, JW0258 gene, yagB gene, yagA gene, yagE gene, yagF gene, yagG gene, yagH gene, yagI gene, argF gene, yfjI gene, yagJ gene, yagK gene, yagL gene, yagM gene, yagN gene, intF gene, yagP gene, yagQ gene, yagR gene, yagS gene, yagT gene, yagU gene, ykgJ gene, yagV gene, yagw gene, yagX gene, yagY gene, yagZ gene, ykgK gene, ykgL gene, ykgM gene, eaeH gene, JW0292 gene, JW0293 gene, ykgA gene, ykgB gene, ykgI gene, merA gene, ykgD gene, ykgE gene, ykgF gene, ykgG gene, ykgH gene, betA gene, betB gene, betI gene, betT gene, yahA gene, yahB gene, yahC gene, yahD gene, yahE gene, yahF gene, yahG gene, yahH gene, arcM gene, yahJ gene, yahK gene, yahL gene, yahM gene, yahN gene, yahO gene, prpR gene, bcpA gene, prpC gene, prpD gene, prpE gene, codB gene, codA gene, cynR gene, cynT gene, cynS gene, cynX gene, lacA gene, lacY gene, lacZ gene, lacI gene, mhpR gene, mhpA gene, mhpB gene, mhpC gene, mhpD gene, mhpF gene, mhpE gene, mhpT gene, yaiL gene, yaiM gene, adhC gene, yaiN gene, yaiO gene, JW0350 gene, yi2A gene, yi22 gene, yi24 gene, yi23 gene, yaiP gene, yaiS gene, tauA gene, tauB gene, tauC gene, ssiD gene, yaiT gene, JW0363 gene, JW0364 gene, yaiU gene, yaiV gene, ampH gene, sbmA gene, yaiW gene, yaiY gene, yaiZ gene, ddlA gene, yaiB gene, phoA gene, psiF gene, yaiC gene, ybbO gene, tesA gene, ybbA gene, ybbP gene, rhsD gene, ybbC gene, rhsE gene, ybbD gene, JW0490 gene, ybbB gene, ybbS gene, ybbT gene, ybbU gene, ybbQ gene, ybbV gene, allP gene, allA gene, ybbY gene, ybbZ gene, ylbA gene, allC gene, ylbC gene, fdrA gene, ylbE gene, ylbF gene, arcC gene, intD gene, EXO_LAMBD gene, VRPP_LAMBD gene, JW0528 gene, JW0529 gene, VREN_LAMBD gene, emrE gene, ybcK gene, ybcL gene, ybcM gene, ybcN gene, ninE gene, ybcO gene, rus gene, ybcQ gene, JW0539.5 gene, nmpC gene, vlyS gene, ybcS gene, ybcT gene, vboR gene, ybcV gene, ybcW gene, nohB gene, ybcX gene, ybcY gene, JW0552 gene, appY gene, ompT gene, envY gene, ybcH gene, nfrA gene, nfrB gene, cusS gene, cusR gene, cusC gene, ylcC gene, cusB gene, cusA gene, pheP gene, ybdG gene, nfnB gene, ybdF gene, ybdJ gene, ybdK gene, hokE gene, yi81 gene, yi82 gene, ymcC gene, ymcD gene, cspH gene, cspG gene, sfa gene, yccL gene, yccM gene, torS gene, torT gene, torR gene, torC gene, torA gene, torD gene, yccD gene, cbpA gene, yccE gene, agp gene, yccJ gene, wrbA gene, yciG gene, ycdG gene, JW0992 gene, JW0993 gene, JW0994 gene, ycdK gene, JW0996 gene, JW0997 gene, ycdC gene, putA gene, yzpU gene, putP gene, JW1002 gene, ycdO gene, ycdB gene, phoH gene, ycdP gene, ycdQ gene, ycdR gene, ycdS gene, ycdT gene, JW1012 gene, JW1013 gene, JW1014 gene, ycdU gene, ymfD gene, ymfE gene, lit gene, intE gene, VXIS_BPP21 gene, ymfH gene, ymfI gene, ymfJ gene, RPC2_BPP22 gene, JW1132 gene, ymfL gene, ymfM gene, ymfN gene, ymfR gene, ymfO gene, JW1138 gene, JW1139 gene, ycfK gene, ymfS gene, ycfA gene, ycfE gene, pin gene, mcrA gene, JW1146 gene, ycgW gene, ycgX gene, ycgE gene, JW1150 gene, ycgZ gene, ymgA gene, JW1153 gene, ymgC gene, yahA gene, JW1156 gene, JW1157 gene, aidA gene, ymgD gene, JW1160 gene, JW1161 gene, JW1162 gene, ydfH gene, ydfZ gene, ydfI gene, shiA gene, JW1537 gene, tnpR gene, ydfM gene, Y314_LAMBD gene, nohA gene, ydfO gene, yccL gene, cspI gene, ydfR gene, vlyS gene, cspB gene, cspF gene, regQ_LAMBD gene, JW1552 gene, rem gene, hokD gene, relE gene, relB gene, ydfV gene, flxA gene, ydfW gene, ydfX gene, dicC gene, sdaC gene, yqeH gene, yqeI gene, yqeJ gene, yqeK gene, ygeF gene, ygeG gene, ygeH gene, ygeI gene, JW2822 gene, ygeK gene, JW2824 gene, JW2825 gene, JW2830 gene, ygeP gene, JW2832 gene, nlpD gene, yagR gene, ygeT gene, JW2836 gene, ygeV gene, ygeW gene, dpaL gene, ygeY gene, ygeZ gene, arcL gene, yqeB gene, JW2844 gene, ygfJ gene, gltD gene, JW2847 gene, ygfM gene, yagR gene, ygfO gene, ygfP gene, ygfQ gene, ygfR gene, ygfS gene, ygfT gene, pbuX gene, idi gene, epsM gene, exeL gene, exeC gene, JW2938 gene, JW2939 gene, JW2940 gene, JW2941 gene, yghK gene, glcB gene, glcG gene, glcF gene, glcD gene, glcC gene, JW2948 gene, yghQ gene, yghR gene, yghS gene, yghT gene, yihL gene, yihM gene, yihN gene, yshA gene, yihO gene, yihP gene, yihQ gene, yihR gene, yihS gene, yihT gene, yihU gene, yihV gene, yihW gene, yihX gene, rbn gene, yihZ gene, yiiD gene, yiiE gene, yiiF gene, yiiG gene, frvR gene, frvX gene, frvB gene, frvA gene, yiiL gene, rhaD gene, rhaA gene, rhaB gene, rhaS gene, rhaR gene, rhaT gene, ptsA gene, JW3920 gene, frwC gene, frwB gene, pflD gene, pflC gene, frwD gene, yijO gene, yijP gene, JW3986 gene, yjbF gene, yjbG gene, yjbH gene, JW3989.5 gene, yjbA gene, xylE gene, malG gene, malF gene, malE gene, malK gene, lamB gene, malM gene, yjbI gene, yjcP gene, yjcQ gene, yjcR gene, yjcS gene, alsK gene, alsE gene, alsC gene, alsA gene, alsB gene, phnQ gene, phnP gene, phnO gene, phnN gene, phnM gene, phnL gene, phnK gene, phnJ gene, phnI gene, phnH gene, phnG gene, phnF gene, phnE gene, phnD gene, phnC gene, phnB gene, phnA gene, yjdA gene and yjcZ gene, or homologous gene thereof.

4. The E. coli mutant strain according to claim 3 comprising chromosomal DNA that does not comprise DNA having the nucleotide sequences as shown in [1] to [18] below of SEQ ID NO: 1 or DNA equivalent thereto.
[1] a nucleotide sequence of nucleotides 243965 to 253410
[2] a nucleotide sequence of nucleotides 261964 to 387531
[3] a nucleotide sequence of nucleotides 389139 to 403703
[4] a nucleotide sequence of nucleotides 518030 to 532711
[5] a nucleotide sequence of nucleotides 535505 to 550215
[6] a nucleotide sequence of nucleotides 563941 to 608118
[7] a nucleotide sequence of nucleotides 1048888 to 1097019
[8] a nucleotide sequence of nucleotides 1198106 to 1225146
[9] a nucleotide sequence of nucleotides 1630912 to 1641038
[10] a nucleotide sequence of nucleotides 1642632 to 1650222
[11] a nucleotide sequence of nucleotides 2985362 to 3033128
[12] a nucleotide sequence of nucleotides 3110110 to 3134341
[13] a nucleotide sequence of nucleotides 4059898 to 4079659
[14] a nucleotide sequence of nucleotides 4086451 to 4099982
[15] a nucleotide sequence of nucleotides 4139232 to 4149709
[16] a nucleotide sequence of nucleotides 4235359 to 4251735
[17] a nucleotide sequence of nucleotides 4298977 to 4311511
[18] a nucleotide sequence of nucleotides 4313318 to 4329721

5. The E. coli mutant strain according to claim 4 comprising chromosomal DNA that does not comprise yidF gene, yidG gene, yidH gene, yidI gene, yidJ gene, yidK gene, yidL gene, JW3657 gene, glvG gene, glvB gene, glvC gene, yidP gene, yidE gene, yidQ gene, yidR gene, yidS gene, dgoT gene, dgoA gene, dgoK gene, dgoR gene, yidW gene, yidX gene, yidA gene, yidB gene, asnA gene, yieM gene, JW3724 gene, yieN gene, kup gene, rbsD gene, rbsA gene, rbsC gene, rbsB gene, rbsK gene, rbsR gene and yieO gene, or homologous gene thereof.

6. The E. coli mutant strain according to claim 5 comprising chromosomal DNA that does not comprise DNA having the nucleotide sequences as shown in [1] to [3] below of SEQ ID NO: 1 or DNA equivalent thereto.
[1] a nucleotide sequence of nucleotides3854662 to 3865831
[2] a nucleotide sequence of nucleotides3867102 to 3877010
[3] a nucleotide sequence of nucleotides 3926659 to 3938878

7. The E. coli mutant strain according to claim 6 comprising chromosomal DNA that does not comprise yecT gene, flhE gene, flhA gene, flhB gene, cheZ gene, cheY gene, cheB gene, cheR gene, tap gene, tar gene, cheW gene, cheA gene, motB gene, motA gene, flhC gene, flhD gene, JW1882 gene, JW1883 gene, yecG gene, otsA gene, otsB gene, araH gene, araG gene, araF gene, yecI gene, yecJ gene, JW1892 gene, ftn gene, yecH gene, tyrP gene, uvrC gene, uvrY gene, yecF gene, sdiA gene, yecC gene, yecS gene, yedO gene, fliY gene, fliZ gene, fliA gene, fliC gene, fliD gene, fliS gene, fliT gene, amyA gene, yedD gene, yedE gene, yedF gene, yedK gene, yedL gene, yedN gene, yedM gene, fliE gene, fliF gene, fliG gene, fliH gene, fliI gene, fliJ gene, fliK gene, fliL gene, fliM gene, fliN gene, fliO gene, fliP gene, fliQ gene, fliR gene, rcsA gene, dsrB gene, JW1937 gene, yedA gene, vsr gene, dcm gene, yedJ gene, JW1946 gene, ompC gene, JW1948 gene, yedS gene, yedU gene, yedV gene, copR gene, yedX gene, JW1954 gene, JW1955 gene, JW1956 gene, JW1974 gene, JW1979 gene, JW1980 gene, yeeP gene, flu gene, JW1983 gene, yeeS gene, yeeU gene, yeeV gene, yeeW gene, yefJ gene, JW2013 gene, yefJ gene, yefI gene, wbbJ gene, yefG gene, rfc gene, glf gene, rfbX gene, rfbC gene, rfbA gene, rfbD gene and rfbB gene, or homologous gene thereof.

8. The E. coli mutant strain according to claim 7 comprising chromosomal DNA that does not comprise DNA having the nucleotide sequences as shown in [1] to [5] below of SEQ ID NO: 1 or DNA equivalent thereto.
[1] a nucleotide sequence of nucleotides 1964524 to 1993075
[2] a nucleotide sequence of nucleotides 1996662 to 2028209
[3] a nucleotide sequence of nucleotides 2033449 to 2044376
[4] a nucleotide sequence of nucleotides 2069149t to 2081926
[5] a nucleotide sequence of nucleotides 2104393 to 2116064

9. The E. coli mutant strain according to claim 8 comprising chromosomal DNA that does not comprise intA gene, yfjH gene, alpA gene, yfjI gene, JW2606 gene, yfjJ gene, yfjK gene, yfjL gene, yfjM gene, yfjN gene, yfjO gene, yfjP gene, yfjQ gene, yfjR gene, ypjK gene, yfjS gene, yfjT gene, yfjU gene, yfjV gene, JW2622 gene, yfjW gene, JW2623.5 gene, yfjX gene, yfjY gene, yfjZ gene, ypjF gene, ypjA gene, JW2629 gene, JW2630 gene, JW2631 gene, JW2632 gene, JW2633 gene, JW2634 gene, ygaE gene, yzzM gene, yqaE gene, JW2642 gene, ygaP gene, stpA gene, JW2645 gene, ygaC gene, ygaM gene, nrdH gene, nrdI gene, nrdE gene, proV gene, proW gene, proX gene, JW2655 gene, JW2656 gene, ygaZ gene, ygaH gene, srlA gene, srlB gene, srlD gene, gutM gene, srlR gene and gutQ gene, or homologous gene thereof.

10. The E. coli mutant strain according to claim 9 comprising chromosomal DNA that does not comprise DNA having the nucleotide sequences as shown in [1] to [4] below of SEQ ID NO: 1 or DNA equivalent thereto.
[1] a nucleotide sequence of nucleotides 2755677 to 2789480
[2] a nucleotide sequence of nucleotides 2795174 to 2800890
[3] a nucleotide sequence of nucleotides 2804308 to 2810147
[4] a nucleotide sequence of nucleotides 2825314 to 2830262

11. The E. coli mutant strain according to claim 10 comprising chromosomal DNA that does not comprise gltF gene, yhcA gene, yhcD gene, yhcE gene, yhcF gene, yhcG gene, yhcH gene, nanK gene and nanE gene, or homologous gene thereof.

12. The E. coli mutant strain according to claim 11 comprising chromosomal DNA that does not comprise DNA having a nucleotide sequence comprising nucleotides 3360737 to 3370547 of SEQ ID NO: 1 or DNA equivalent thereto.

13. The E. coli mutant strain according to claim 12 comprising chromosomal DNA that does not comprise yegE gene, alkA gene, yegD gene, JW2055 gene, JW2056 gene, JW2057 gene, JW2058 gene, yegM gene, yegN gene, yegO gene, yegB gene, baeS gene, baeR gene, JW2065 gene, yegQ gene, ogrK gene, JW2068 gene, JW2069 gene, yegS gene, gatR gene, JW2072 gene, JW2073 gene, gatR gene, gatD gene, gatC gene, gatB gene, gatA gene, gatZ gene, gatY gene, fbaB gene, xegT gene, yegU gene, yegV gene, yegW gene, yegX gene, molR gene, yehI gene, yehK gene, yehL gene, yehO gene, yehP gene, yehQ gene, yehR gene, yehS gene, yehT gene, yehU gene, yehV gene, yehW gene, yehX gene, yehY gene, yehZ gene, bglX gene, dld gene, pbpG gene, yohC gene, yeiQ gene, yeiR gene, yeiU gene, spr gene, rtn gene, yejA gene, yejB gene, yejE gene, yejF gene, yejG gene, bcr gene, rsuA gene, yejH gene, yeiI gene, yeiJ gene, yeiK gene, yeiL gene, yeiM gene, yeiN gene and yeiC gene, or homologous gene thereof.

14. The E. coli mutant strain according to claim 13 comprising chromosomal DNA that does not comprise DNA having any of the nucleotide sequences as shown in [1] to [4] below of SEQ ID NO: 1 or DNA equivalent thereto.
[1] a nucleotide sequence of nucleotides2l46264 to 2187855
[2] a nucleotide sequence of nucleotides 2200669 to 2229850
[3] a nucleotide sequence of nucleotides 2270440 to 2286588
[4] a nucleotide sequence of nucleotides 2255895 to 2263491

15. The E. coli mutant strain according to claim 14 comprising chromosomal DNA that does not copmrise cmtA gene, cmtB gene, or homologous gene thereof.

16. The E. coli mutant strain according to claim 15 comprising chromosomal DNA that does not comprise DNA having a nucleotide sequence comprising nucleotides 3077085 to 3078916 of SEQ ID NO: 1 or DNA equivalent thereto.

17. The E. coli mutant strain according to claim 16 comprising chromosomal DNA that does not comprise intB gene, JW4228 gene, yjgW gene, yjgX gene, yjgY gene, yjgZ gene, yi41 gene, yi42 gene, yjhB gene, yjhC gene, yjhD gene, yjhE gene, yi91 gene, JW4244 gene, JW4245 gene, JW4246 gene, yjhU gene, yjhF gene, yjhG gene, yjhH gene, yjhI gene, sgcR gene, sgcE gene, sgcA gene, sgcQ gene, sgcC gene, JW4266.5 gene, sgcx gene, yjhP gene, yjhQ gene, JW4269.5 gene, JW4270 gene, JW4270.5 gene, yjhR gene, yjhS gene, yjhT gene, yjhA gene, fimB gene, fimE gene, fimA gene, fimI gene, fimC gene, fimD gene, fimF gene, fimG gene, fimH gene, gntP gene, uxuA gene, uxuB gene, uxuR gene, yjiC gene, yjiD gene, yjiE gene, iadA gene, yjiG gene, yjiH gene, yjiI gene, yjiJ gene, yjiK gene, JW4296.5 gene, yjiL gene, yjiM gene, yjiN gene, yjiO gene, yjiP gene, yjiQ gene, yjiR gene, yjiS gene, yjiT gene, yjiV gene, mcrD gene, mcrC gene, mcrB gene, yjiW gene, hsdS gene, hsdM gene, hsdR gene, mrr gene, yjiA gene, yjiX gene, yjiY gene, tsr gene, yjjL gene, JW4320 gene, yjjM gene, yjjN gene, mdoB gene and yjjA gene, or homologous gene thereof.

18. The E. coli mutant strain according to claim 17 comprising chromosomal DNA that does not comprise DNA having the nucleotide sequences as shown in [1] and/or [2] below of SEQ ID NO: 1 or DNA equivalent thereto.
[1] a nucleotide sequence of nucleotides 4496202 to 4509534
[2] a nucleotide sequence of nucleotides 4517876 to 4599637

19. The E. coli mutant strain according to claim 18 comprising chromosomal DNA that does not comprise kdpF gene, ybfA gene, rhsC gene, JW0690 gene, ybfB gene, rhsA gene, ybfC gene, ybfD gene, ybfL gene, ybfD gene and ybgA gene, or homologous gene thereof.

20. The E. coli mutant strain according to claim 19 comprising chromosomal DNA that does not comprise DNA having a nucleotide sequence comprising nucleotides 728821 to 739593 of SEQ ID NO: 1 or DNA equivalent thereto.

21. The E. coli mutant strain according to claim 20 comprising chromosomal DNA that does not comprise yjfI gene, yjfJ gene, yjfK gene, yjfL gene, yjfM gene, yjfC gene, aidB gene, yjfN gene, yjfO gene, yjfP gene, yjfQ gene, yjfR gene, sgaT gene, sgaB gene, sgaA gene, sgaH gene and sgaU gene, or homologous gene thereof.

22. The E. coli mutant strain according to claim 21 comprising chromosomal DNA that does not comprise DNA having a nucleotide sequence comprising nucleotides 4409533 to 4423151 of SEQ ID NO: 1 or DNA equivalent thereto.

23. An E. coli mutant strain comprising thrA gene, thrB gene, thrC gene, talB gene, mog gene, htgA gene, dnaK gene, dnaJ gene, hokC gene, nhaA gene, nhaR gene, rpsT gene, ribF gene, ileS gene, lspA gene, fkpB gene, lytB gene, dapB gene, carA gene, carB gene, caiF gene, caiE gene, caiD gene, caiC gene, caiB gene, caiA gene, caiT gene, fixA gene, fixB gene, fixC gene, fixX gene, kefC gene, folA gene, apaH gene, apaG gene, ksgA gene, pdxA gene, surA gene, imp gene, djlA gene, rluA gene, hepA gene, polB gene, araD gene, araA gene, araB gene, araC gene, tbpA gene, leuD gene, leuC gene, leuB gene, leuA gene, leuL gene, leuO gene, ilvI gene, ilvH gene, fruR gene, ftsL gene, ftsI gene, murE gene, murF gene, mraY gene, murD gene, ftsW gene, murG gene, murC gene, ddlB gene, ftsQ gene, ftsA gene, ftsZ gene, lpxC gene, secA gene, mutT gene, yacE gene, guaC gene, hofC gene, hofB gene, ppdD gene, nadC gene, ampD gene, ampE gene, aroP gene, pdhR gene, aceE gene, aceF gene, lpdA gene, acnB gene, speD gene, speE gene, gcd gene, hpt gene, yadF gene, panD gene, panC gene, panB gene, htrE gene, ecpD gene, folK gene, pcnB gene, dksA gene, sfsA gene, ligT gene, hrpB gene, ponB gene, hemL gene, pfs gene, dgt gene, htrA gene, dapD gene, glnD gene, map gene, rpsB gene, tsf gene, smb gene, rrf gene, dxr gene, rth gene, cdsA gene, yaeL gene, hlpA gene, lpxD gene, fabZ gene, lpxA gene, lpxB gene, rnhB gene, dnaE gene, accA gene, ldcC gene, mesJ gene, rof gene, cutF gene, proS gene, rcsF gene, abc gene, dniR gene, gloB gene, mhA gene, dnaQ gene, up18 gene, gmhA gene, pepD gene, gpt gene, crl gene, phoE gene, proB gene, proA gene, hemB gene, proC gene, aroL gene, aroM gene, araJ gene, sbcC gene, sbcD gene, phoB gene, phoR gene, brnQ gene, proY gene, malZ gene, queA gene, tgt gene, secD gene, secF gene, tsx gene, ribD gene, ribH gene, nusB gene, thiL gene, pgpA gene, dxs gene, ispA gene, xseB gene, thiI gene, thiJ gene, apbA gene, cyoE gene, cyoD gene, cyoC gene, cyoB gene, cyoA gene, ampG gene, bolA gene, tig gene, clpP gene, clpX gene, lon gene, hupB gene, cof gene, mdlA gene, mdlB gene, glnK gene, amtB gene, tesB gene, maa gene, hha gene, acrB gene, acrA gene, acrR gene, aefA gene, priC gene, apt gene, dnaX gene, recR gene, htpG gene, adk gene, hemH gene, aes gene, gsk gene, fsr gene, ushA gene, cueR gene, gcl gene, gip gene, purK gene, purE gene, ybbF gene, ppiB gene, cysS gene, folD gene, sfmA gene, sfmC gene, sfmD gene, sfmH gene, sfmF gene, fimZ gene, entD gene, fepA gene, fes gene, entF gene, fepE gene, fepC gene, fepG gene, fepD gene, fepB gene, entC gene, entE gene, entB gene, entA gene, cstA gene, dsbG gene, ahpC gene, ahpF gene, mk gene, ma gene, citT gene, citG gene, citX gene, citF gene, citE gene, citD gene, citC gene, citA gene, citB gene, dcuC gene, dcuC gene, crcA gene, cspE gene, crcB gene, lipA gene, lipB gene, dacA gene, ripA gene, mrdB gene, mrdA gene, phpB gene, nadD gene, holA gene, rlpB gene, leuS gene, lnt gene, phoL gene, ubiF gene, asnB gene, nagD gene, nagC gene, nagA gene, nagB gene, nagE gene, glnS gene, fur gene, fldA gene, seqA gene, pgm gene, potE gene, speF gene, kdpE gene, kdpD gene, kdpC gene, kdpB gene, kdpA gene, phrB gene, end8 gene, abrB gene, gltA gene, sdhC gene, sdhD gene, sdhA gene, sdhB gene, sucA gene, sucB gene, sucC gene, sucD gene, farR gene, hrsA gene, cydA gene, cydB gene, tolQ gene, tolR gene, tolA gene, tolB gene, pal gene, nadA gene, pnuC gene, czcD gene, aroG gene, gpmA gene, galM gene, galK gene, galT gene, galE gene, modF gene, modE gene, modA gene, modB gene, modC gene, bioA gene, bioB gene, bioF gene, bioC gene, bioD gene, uvrB gene, moaA gene, moaB gene, moaC gene, moaD gene, moaE gene, rhlE gene, dps gene, ompX gene, mipB gene, moeB gene, moeA gene, mdfA gene, grxA gene, poxB gene, aqpZ gene, cspD gene, clpA gene, infA gene, aat gene, cydC gene, cydD gene, trxB gene, lrp gene, ftsK gene, lolA gene, serS gene, dmsA gene, dmsB gene, dmsC gene, pflA gene, pflB gene, focA gene, serC gene, aroA gene, cmk gene, rpsA gene, himD gene, msbA gene, lpxK gene, kdsB gene, smtA gene, mukF gene, kicA gene, mukB gene, aspC gene, ompF gene, asnS gene, pncB gene, pepN gene, ssuB gene, ssuC gene, ssuD gene, ssuA gene, ssuE gene, pyrD gene, uup gene, pqiA gene, pqiB gene, rmf gene, fabA gene, ompA gene, sulA gene, helD gene, mgsA gene, acyP gene, hyaA gene, hyaB gene, hyaC gene, hyaD gene, hyaE gene, hyaF gene, appC gene, appB gene, appA gene, csgG gene, csgF gene, csgE gene, csgD gene, csgB gene, csgA gene, csgC gene, sfaA gene, mdoG gene, mdoH gene, msyB gene, htrB gene, solA gene, dinI gene, pyrC gene, grxB gene, rimJ gene, mviM gene, mviN gene, flgN gene, flgM gene, flgA gene, flgB gene, flgC gene, flgD gene, flgE gene, flgF gene, flgG gene, flgH gene, flgI gene, flgJ gene, flgK gene, flgL gene, me gene, rluC gene, rpmF gene, plsX gene, fabH gene, fabD gene, fabG gene, acpP gene, fabF gene, pabC gene, tmk gene, holB gene, ptsG gene, fhuE gene, nagZ gene, ndh gene, mfd gene, ycfU gene, ycfV gene, ycfW gene, cobB gene, potD gene, potC gene, potB gene, potA gene, pepT gene, phoQ gene, phoP gene, purB gene, trmU gene, icdA gene, minE gene, minD gene, minC gene, clyA gene, umuD gene, umuC gene, dsbB gene, nhaB gene, fadR gene, dadA gene, dadX gene, ldcA gene, mltE gene, tagl gene, treA gene, dhaR gene, pth gene, prsA gene, ychB gene, hemM gene, hemA gene, prfA gene, hemK gene, kdsA gene, chaA gene, chaB gene, chaC gene, narL gene, narX gene, narK gene, narG gene, narH gene, narJ gene, narI gene, tpr gene, purU gene, sprE gene, galU gene, hns gene, tdk gene, adhE gene, oppA gene, oppB gene, oppC gene, oppD gene, oppF gene, cls gene, kch gene, tonB gene, trpA gene, trpB gene, trpC gene, trpD gene, trpE gene, trpL gene, btuR gene, sohB gene, topA gene, cysB gene, acnA gene, ribA gene, pgpB gene, pyrF gene, osmB gene, mb gene, envM gene, sapF gene, sapD gene, sapC gene, sapB gene, sapA gene, aldH gene, ordL gene, goaG gene, pspF gene, pspA gene, pspB gene, pspC gene, pspD gene, pspE gene, sucP gene, ompG gene, tyrR gene, tpx gene, mppA gene, fnr gene, ogt gene, dbpA gene, intR gene, lar gene, recT gene, recE gene, racC gene, kil gene, sieB gene, racR gene, dnaC gene, enpP gene, trkG gene, VMTH_LAMBD gene, VLOM_LAMBD gene, tnpO gene, upo3 gene, ompN gene, nifJ gene, hslJ gene, ldhA gene, feaR gene, feaB gene, tynA gene, paaZ gene, paaA gene, paaB gene, paaC gene, paaD gene, paaE gene, paaF gene, paaG gene, paaH gene, paaI gene, paaJ gene, paaK gene, paaX gene, paaY gene, acpD gene, hrpA gene, aldA gene, gapC gene, gapC gene, cybB gene, trg gene, rimL gene, tehA gene, tehB gene, prtC gene, potA gene, potC gene, ansP gene, nhoA gene, narV gene, narW gene, narY gene, narZ gene, narU gene, fdnG gene, fdnH gene, fdnI gene, adhP gene, sfcA gene, rpsV gene, osmC gene, dos gene, xasA gene, gadB gene, pqqL gene, chuR gene, hipA gene, hipB gene, tam gene, uxaB gene, marC gene, marR gene, marA gene, marB gene, dcp gene, lycV gene, dicA gene, dicB gene, rspB gene, rspA gene, speG gene, dmsB gene, dmsC gene, bioD gene, mlc gene, asr gene, ebr gene, pntB gene, pntA gene, arcD gene, rstA gene, rstB gene, tus gene, fumC gene, fumA gene, manA gene, uidC gene, uidB gene, uidA gene, uidR gene, hdhA gene, malI gene, malX gene, malY gene, add gene, blr gene, nth gene, gst gene, pdxY gene, tyrS gene, pdxH gene, slyB gene, slyA gene, sodC gene, nemA gene, gloA gene, mt gene, lhr gene, sodB gene, araJ gene, purR gene, cfa gene, ribE gene, ag43 gene, phsC gene, nrfC gene, pykF gene, lpp gene, sufS gene, aroD gene, ppsA gene, aroH gene, nlpC gene, btuD gene, btuE gene, btuC gene, himA gene, pheT gene, pheS gene, pheM gene, rplT gene, rpmI gene, infC gene, thrS gene, arp gene, pfkB gene, cedA gene, katE gene, celF gene, celD gene, ceIC gene, celB gene, celA gene, osmE gene, nadE gene, spy gene, astE gene, astB gene, astD gene, astA gene, cstC gene, xthA gene, gdhA gene, topB gene, selD gene, sppA gene, ansA gene, tdh gene, gapA gene, ttuC gene, caiT gene, md gene, fadD gene, slp gene, pabB gene, sdaA gene, manX gene, manY gene, manZ gene, rrmA gene, cspC gene, kdgR gene, tcmA gene, htpX gene, prc gene, pqiB gene, pphA gene, holE gene, exoX gene, ptrB gene, purT gene, eda gene, edd gene, zwf gene, pykA gene, mlt gene, znuA gene, znuC gene, ruvB gene, ruvA gene, ruvC gene, ntpA gene, aspS gene, bisZ gene, torY gene, cutC gene, argS gene, pgsA gene, amn gene, cbl gene, nac gene, erfK gene, cobT gene, cobS gene, cobU gene, gyrI gene, phsE gene, sbcB gene, hisL gene, hisG gene, hisD gene, hisC gene, hisB gene, hisH gene, hisA gene, hisF gene, hisI gene, wzz gene, ugd gene, gnd gene, galF gene, wcaM gene, wcaL gene, wcaK gene, wzxC gene, wcaJ gene, cpsG gene, cpsB gene, wcaI gene, wcaH gene, wcaG gene, gmd gene, wcaF gene, wcaE gene, wcaD gene, wcaC gene, wcaB gene, wcaA gene, wzb gene, wza gene, asmA gene, dcd gene, udk gene, thiD gene, thiM gene, mrp gene, metG gene, cdd gene, sanA gene, mglC gene, mglA gene, mglB gene, galS gene, folE gene, cirA gene, lysP gene, nfo gene, fruA gene, fruK gene, fruB gene, rplY gene, narP gene, ccmH gene, dsbE gene, ccmF gene, ccmE gene, ccmD gene, ccmC gene, ccmB gene, ccmA gene, napC gene, napB gene, napH gene, napG gene, napA gene, napD gene, napF gene, eco gene, alkB gene, ada gene, apbE gene, rcsB gene, rcsC gene, atoS gene, atoC gene, atoD gene, atoA gene, atoE gene, atoB gene, gyrA gene, ubiG gene, nrdA gene, nrdB gene, inaA gene, glpQ gene, glpT gene, glpA gene, glpB gene, glpC gene, cinA gene, ais gene, pmrD gene, menE gene, menC gene, menB gene, menD gene, menF gene, nuoN gene, nuoM gene, nuoL gene, nuoK gene, nuoJ gene, nuoI gene, nuoH gene, nuoG gene, nuoF gene, nuoE gene, nuoD gene, nuoB gene, nuoA gene, lrhA gene, ackA gene, pta gene, ubiX gene, purF gene, dedE gene, dedD gene, folC gene, accD gene, dedA gene, truA gene, usg1 gene, pdxB gene, div gene, fabB gene, ddpX gene, mepA gene, aroC gene, sixA gene, fadL gene, vacJ gene, dsdC gene, dsdX gene, dsdA gene, emrY gene, emrK gene, evgA gene, evgS gene, bifF gene, ddg gene, glk gene, mntH gene, nupC gene, gltX gene, xapR gene, xapB gene, xapA gene, lig gene, zipA gene, cysZ gene, cysK gene, ptsH gene, ptsI gene, gsr gene, pdxK gene, cysM gene, cysA gene, cysW gene, cysU gene, cysP gene, ucpA gene, ptbA gene, amiA gene, hemF gene, cchA gene, eutC gene, eutB gene, eutH gene, eutG gene, eutJ gene, eutE gene, cchB gene, eutI gene, talA gene, tktB gene, aegA gene, narQ gene, acrD gene, dapE gene, purC gene, nlpB gene, dapA gene, gcvR gene, bcp gene, hyfA gene, hyfB gene, hyfC gene, hyfD gene, hyfE gene, hyfF gene, hyfG gene, hyfH gene, hyfI gene, hyfJ gene, hyfR gene, focB gene, perM gene, yfgE gene, uraA gene, upp gene, purM gene, purN gene, ppk gene, ppx gene, guaA gene, guaB gene, xseA gene, hisS gene, gcpE gene, ndk gene, pbpC gene, sseA gene, sseB gene, pepB gene, fdx gene, hscA gene, hscB gene, iscU gene, iscS gene, iscR gene, suhB gene, csiE gene, dgxA gene, dgxB gene, hcaC gene, hcaB gene, hcaD gene, glyA gene, hmpA gene, glnB gene, purL gene, acpS gene, pdxJ gene, recO gene, era gene, mc gene, lepB gene, lepA gene, rseC gene, rseB gene, rseA gene, rpoE gene, nadB gene, srmB gene, ung gene, trx2 gene, pssA gene, kgtP gene, clpB gene, riuD gene, pheL gene, pheA gene, tyrA gene, aroF gene, rplS gene, trmD gene, rimM gene, rpsP gene, ffh gene, grpE gene, recN gene, smpA gene, smpB gene, gabD gene, gabT gene, gabP gene, nrdF gene, emrR gene, emrA gene, emrB gene, gshA gene, csrA gene, alaS gene, oraA gene, recA gene, mltB gene, hypF gene, hydN gene, ascG gene, ascF gene, ascB gene, hyc gene, hycH gene, hycG gene, hycF gene, hycE gene, hycD gene, hycC gene, hycB gene, hycA gene, hypA gene, hypB gene, hypC gene, hypD gene, hypE gene, fhlA gene, mutS gene, prpB gene, rpoS gene, pcm gene, surE gene, ygbB gene, ygbP gene, ygbQ gene, cysC gene, cysN gene, cysD gene, iap gene, cysH gene, cysI gene, cysJ gene, ptpS gene, eno gene, pyrG gene, mazG gene, chpR gene, relA gene, barA gene, gud2 gene, gudT gene, mioC gene, syd gene, sdaB gene, exo gene, fucO gene, fucA gene, fucP gene, fuc gene, fucK gene, fucU gene, fucR gene, gcvA gene, nifS gene, mltA gene, amiC gene, argA gene, thyA gene, lgt gene, ptsP gene, mutH gene, tas gene, aas gene, galR gene, lysA gene, lysR gene, araE gene, kduD gene, kduI gene, lysS gene, prfB gene, recJ gene, dsbC gene, xerD gene, fldB gene, up14 gene, bglA gene, gcvP gene, gcvH gene, gcvT gene, visC gene, ubiH gene, pepP gene, serA gene, rpiA gene, iciA gene, sbm gene, argK gene, fba gene, pgk gene, epd gene, tktA gene, speB gene, speA gene, metK gene, galP gene, sprT gene, endA gene, gshB gene, yqgF gene, ansB gene, mutY gene, mltC gene, nupG gene, speC gene, pitB gene, gsp gene, hybG gene, hybF gene, hybE gene, hybD gene, hybC gene, hybB gene, hybA gene, hoxK gene, exbD gene, exbB gene, metC gene, exsA gene, sufI gene, plsC gene, parC gene, parE gene, icc gene, tolC gene, ribB gene, glgS gene, rfaE gene, glnE gene, cca gene, bacA gene, folB gene, ttdA gene, ttdB gene, ygjD gene, rpsU gene, dnaG gene, rpoD gene, aer gene, ebgR gene, ebgA gene, ebgC gene, fadH gene, uxaA gene, uxaC gene, exuT gene, exuR gene, tdcE gene, tdcD gene, tdcC gene, tdcB gene, tdcA gene, tdcR gene, sohA gene, agaR gene, agaZ gene, agaV gene, agaw gene, agaA gene, agaS gene, agaY gene, agaB gene, agaC gene, agaD gene, agaI gene, mtr gene, deaD gene, nlpI gene, pnp gene, rpsO gene, truB gene, rbfA gene, infB gene, nusA gene, argG gene, secG gene, mrsA gene, folP gene, ftsH gene, ftsJ gene, greA gene, dacB gene, yhbZ gene, rpmA gene, rplU gene, ispB gene, nlp gene, murA gene, yrbI gene, yrbK gene, rpoN gene, ptsN gene, ptsO gene, mtgA gene, arcB gene, gltB gene, nanT gene, npl gene, nanR gene, dcuD gene, sspB gene, sspA gene, rpsI gene, rpIM gene, hhoA gene, hhoB gene, mdh gene, argR gene, tldD gene, rng gene, mreD gene, mreC gene, mreB gene, accB gene, accC gene, panF gene, prmA gene, fis gene, aroE gene, smg gene, smf gene, def gene, fmt gene, sun gene, trkA gene, mscL gene, zntR gene, rplQ gene, rpoA gene, rpsD gene, rpsK gene, rpsM gene, rpmJ gene, secY gene, rplO gene, rpmD gene, rpsE gene, rplR gene, rplF gene, rpsH gene, rpsN gene, rplE gene, rplX gene, rplN gene, rpsQ gene, rpmC gene, rpiP gene, rpsC gene, rplV gene, rpsS gene, rplB gene, rplW gene, rpiD gene, rpiC gene, rpsJ gene, tufA gene, fusA gene, rpsG gene, rpsL gene, fkpA gene, slyX gene, slyD gene, kefB gene, prkB gene, crp gene, argD gene, pabA gene, fic gene, ppiA gene, nirB gene, nirD gene, nirC gene, cysG gene, php gene, trpS gene, gph gene, rpe gene, dam gene, damX gene, aroB gene, aroK gene, hofQ gene, mrcA gene, pckA gene, envZ gene, ompR gene, greB gene, feoA gene, feoB gene, bioH gene, gntT gene, malQ gene, malP gene, malT gene, rtcA gene, rtcB gene, rtcR gene, glpR gene, glpG gene, glpE gene, glpD gene, glgP gene, glgA gene, glgC gene, glgX gene, glgB gene, asd gene, gntU gene, gntU gene, gntK gene, gntR gene, ggt gene, ugpQ gene, ugpC gene, ugpE gene, ugpA gene, ugpB gene, livF gene, livG gene, livM gene, livH gene, livK gene, livJ gene, rpoH gene, ftsX gene, ftsE gene, ftsY gene, atzN gene, nikA gene, nikB gene, nikC gene, nikD gene, nikE gene, pitA gene, uspB gene, uspA gene, priC gene, gor gene, arsR gene, arsB gene, arsC gene, slp gene, hdeB gene, hdeA gene, hdeD gene, gadA gene, treF gene, kdgK gene, dctA gene, dppF gene, dppD gene, dppC gene, dppB gene, dppA gene, tag gene, bisC gene, cspA gene, glyS gene, glyQ gene, xylB gene, xylA gene, xylF gene, xylG gene, xylH gene, xylR gene, bax gene, malS gene, avtA gene, lyx gene, sgbH gene, sgbU gene, sgbE gene, aldB gene, selB gene, selA gene, mtlA gene, mtlD gene, mtlR gene, lldP gene, lldR gene, lldD gene, cysE gene, gpsA gene, secB gene, grxC gene, tdh gene, kbl gene, htrL gene, rfaD gene, rfaF gene, rfaC gene, rfaL gene, rfaK gene, rfaZ gene, rfaY gene, rfaJ gene, rfaI gene, rfaB gene, rfaS gene, rfaP gene, rfaG gene, rfaQ gene, kdtA gene, kdtB gene, mutM gene, rpmG gene, rpmB gene, radC gene, dfp gene, dut gene, ttk gene, pyrE gene, rph gene, dinD gene, gmk gene, rpoZ gene, spoT gene, spoU gene, recG gene, gltS gene, nlpA gene, uhpT gene, uhpC gene, uhpB gene, uhpA gene, ilvN gene, ilvB gene, ivbL gene, emrD gene, ibpB gene, ibpA gene, gyrB gene, recF gene, dnaN gene, dnaA gene, rpmH gene, rnpA gene, yidC gene, thdF gene, tnaL gene, tnaA gene, tnaB gene, bglB gene, bglF gene, bglG gene, phoU gene, pstB gene, pstA gene, pstC gene, pstS gene, glmS gene, glmU gene, atpC gene, uncD gene, atpG gene, atpA gene, atpH gene, atpF gene, atpE gene, atpB gene, atpI gene, gidB gene, gidA gene, mioC gene, asnC gene, pssR gene, ilvL gene, ilvG gene, ilvM gene, ilvE gene, ilvD gene, ilvA gene, ilvY gene, ilvC gene, ppiC gene, rep gene, gppA gene, rhIB gene, trxA gene, rhoL gene, rho gene, rfe gene, wzzE gene, nfrC gene, rffD gene, rffG gene, rffH gene, rffA gene, wzxE gene, rffT gene, wecG gene, aslB gene, aslA gene, hemY gene, hemX gene, hemD gene, hemC gene, cyaA gene, cyaY gene, dapF gene, xerC gene, uvrD gene, corA gene, radD gene, pldA gene, recQ gene, pldB gene, metR gene, metE gene, udp gene, ubiE gene, aarF gene, tatC gene, tatD gene, rfaH gene, ubiD gene, ubiB gene, fadA gene, fadB gene, pepQ gene, trkH gene, trkH gene, hemG gene, mobB gene, mobA gene, dsbA gene, polA gene, yihA gene, hemN gene, ntrC gene, ntrB gene, glnA gene, fdhE gene, fdol gene, fdoH gene, fdoG gene, fdhD gene, sodA gene, kdgT gene, cpxA gene, cpxR gene, cpxP gene, pfkA gene, sbp gene, cdh gene, tpiA gene, fpr gene, glpX gene, glpK gene, glpF gene, menG gene, menA gene, hslU gene, hslV gene, ftsN gene, cytR gene, priA gene, rpmE gene, metJ gene, metB gene, metL gene, metF gene, katG gene, gldA gene, talC gene, ppc gene, argE gene, argC gene, argB gene, argH gene, oxyR gene, udhA gene, trmA gene, btuB gene, murI gene, murB gene, birA gene, coaA gene, tufB gene, secE gene, nusG gene, rplK gene, rplA gene, rplJ gene, rplL gene, rpoB gene, rpoC gene, htrC gene, thiH gene, thiG gene, thiS gene, thiF gene, thiE gene, thiC gene, rsd gene, hemE gene, nfi gene, hupA gene, hydH gene, hydG gene, purD gene, purH gene, metA gene, aceB gene, aceA gene, aceK gene, arp gene, icIR gene, metH gene, pepE gene, lysC gene, pgi gene, ubiC gene, ubiA gene, plsB gene, dgkA gene, lexA gene, dinF gene, qor gene, dnaB gene, alr gene, tyrB gene, napA gene, hobH gene, uvrA gene, ssb gene, soxS gene, soxR gene, acs gene, nrfA gene, nrfB gene, nrfC gene, nrfD gene, nrfE gene, nrfF gene, nrfG gene, gltP gene, fdhF gene, alsR gene, rpiB gene, proP gene, basS gene, basR gene, adiY gene, adi gene, melR gene, melA gene, melB gene, fumB gene, dcuB gene, dcuR gene, dcuS gene, lysU gene, cadA gene, cadB gene, cadC gene, cutA3 gene, cutA2 gene, cutA gene, dcuA gene, aspA gene, fxsA gene, groES gene, groEL gene, efp gene, ecnB gene, sugE gene, blc gene, ampC gene, frdD gene, frdC gene, frdB gene, frdA gene, genX gene, psd gene, yjeQ gene, yjeE gene, amiB gene, mutL gene, miaA gene, hfq gene, hflX gene, hflK gene, hflC gene, purA gene, vacB gene, sgaE gene, rpsF gene, priB gene, rpsR gene, rplI gene, fklB gene, cycA gene, cpdB gene, cysQ gene, msrA gene, chpS gene, chpB gene, ppa gene, fbp gene, mpl gene, pmbA gene, cybC gene, nrdG gene, nrdD gene, treC gene, treB gene, treR gene, mgtA gene, pyrI gene, pyrB gene, pyrBI gene, argl gene, valS gene, holC gene, xerB gene, idnR gene, idnT gene, idnO gene, idnD gene, idnK gene, fecE gene, fecD gene, fecC gene, fecB gene, fecA gene, fecR gene, fecI gene, dnaC gene, dnaT gene, bglJ gene, fhuF gene, rsmC gene, holD gene, rimI gene, prfC gene, osmY gene, deoC gene, deoA gene, deoB gene, deoD gene, lplA gene, smp gene, serB gene, radA gene, nadR gene, slt gene, trpR gene, gpmG gene, rob gene, creA gene, creB gene, creC gene, creD gene, arcA gene, lasT gene, thrL gene, spr gene, bcr gene, rsuA gene, or homologous gene thereof and comprising chromosomal DNA that is at least 933 kbp shorter than that of a wild-type E. coli strain.

24. The E. coli mutant strain according to claim 23 comprising chromosomal DNA that comprises DNA having the nucleotide sequences as shown in [1] to [55] below of SEQ ID NO: 1 or DNA equivalent thereto.
[1] a nucleotide sequence of nucleotides 1 to 167064
[2] a nucleotide sequence of nucleotides 172980 to 243964
[3] a nucleotide sequence of nucleotides 253411 to 261963
[4] a nucleotide sequence of nucleotides 387532 to 389138
[5] a nucleotide sequence of nucleotides 403704 to 518029
[6] a nucleotide sequence of nucleotides 532712 to 535504
[7] a nucleotide sequence of nucleotides 550216 to 563940
[8] a nucleotide sequence of nucleotides 608119 to 675103
[9] a nucleotide sequence of nucleotides 689375 to 728820
[10] a nucleotide sequence of nucleotides 739594 to 832551
[11] a nucleotide sequence of nucleotides 848090 to 867637
[12] a nucleotide sequence of nucleotides 883474 to 890997
[13] a nucleotide sequence of nucleotides 909380 to 1048887
[14] a nucleotide sequence of nucleotides 1097020 to 1198105
[15] a nucleotide sequence of nucleotides 1225147 to 1630911
[16] a nucleotide sequence of nucleotides 1641039 to 1642631
[17] a nucleotide sequence of nucleotides 1650223 to 1964523
[18] a nucleotide sequence of nucleotides 1993076 to 1996661
[19] a nucleotide sequence of nucleotides 2028210 to 2033448
[20] a nucleotide sequence of nucleotides 2044377 to 2069148
[21] a nucleotide sequence of nucleotides 2081927 to 2104392
[22] a nucleotide sequence of nucleotides 2116065 to 2146263
[23] a nucleotide sequence of nucleotides 2187856 to 2200668
[24] a nucleotide sequence of nucleotides 2229851 to 2255894
[25] a nucleotide sequence of nucleotides 2263492 to 2270439
[26] a nucleotide sequence of nucleotides 2286589 to 2386261
[27] a nucleotide sequence of nucleotides 2395472 to 2423364
[28] a nucleotide sequence of nucleotides 2434099 to 2472851
[29] a nucleotide sequence of nucleotides 2482483 to 2505074
[30] a nucleotide sequence of nucleotides 2514558 to 2755676
[31] a nucleotide sequence of nucleotides 2789481 to 2795173
[32] a nucleotide sequence of nucleotides 2800891 to 2804307
[33] a nucleotide sequence of nucleotides 2810148 to 2825313
[34] a nucleotide sequence of nucleotides 2830263 to 2910273
[35] a nucleotide sequence of nucleotides 2910574 to 2985361
[36] a nucleotide sequence of nucleotides 3033129 to 3077084
[37] a nucleotide sequence of nucleotides 3078917 to 3110109
[38] a nucleotide sequence of nucleotides 3134342 to 3165627
[39] a nucleotide sequence of nucleotides 3172941 to 3360736
[40] a nucleotide sequence of nucleotides 3370548 to 3411159
[41] a nucleotide sequence of nucleotides 3420879 to 3453020
[42] a nucleotide sequence of nucleotides 3469367 to 3618575
[43] a nucleotide sequence of nucleotides 3636917 to 3854661
[44] a nucleotide sequence of nucleotides 3865832 to 3867101
[45] a nucleotide sequence of nucleotides 3877011 to 3926658
[46] a nucleotide sequence of nucleotides 3938879 to 4059897
[47] a nucleotide sequence of nucleotides 4079660 to 4086450
[48] a nucleotide sequence of nucleotides 4099983 to 4139231
[49] a nucleotide sequence of nucleotides 4149710 to 4235358
[50] a nucleotide sequence of nucleotides 4251736 to 4298976
[51] a nucleotide sequence of nucleotides 4311512 to 4313317
[52] a nucleotide sequence of nucleotides 4329722 to 4409532
[53] a nucleotide sequence of nucleotides 4423152 to 4496201
[54] a nucleotide sequence of nucleotides 4509535 to 4517875
[55] a nucleotide sequence of nucleotides 4599638 to 4641433 and DNA having a nucleotide sequence comprising nucleotides 2270440 to 2286588 of SEQ ID NO: 1 or DNA equivalent thereto.

25. The E. coli mutant strain according to claim 23 or 24 comprising chromosomal DNA that does not comprise yafJ gene, yafK gene, yafQ gene, dinJ gene, yafL gene, yafM gene, fhiA gene, lafU gene, dinP gene, yafN gene, yafO gene, yafP gene, JW0225 gene, prfH gene, ykfI gene, yafW gene, yeeT gene, ykfG gene, yafX gene, ykfF gene, ykfB gene, yafY gene, ypjK gene, yafZ gene, ykfA gene, perR gene, JW0245 gene, JW0246 gene, JW0247 gene, ykfC gene, JW0249 gene, is5B gene, yi51 gene, mmuP gene, mmuM gene, afuC gene, JW0255 gene, insB gene, insA gene, JW0258 gene, yagB gene, yagA gene, yagE gene, yagF gene, yagG gene, yagH gene, yagI gene, argF gene, yfjI gene, yagJ gene, yagK gene, yagL gene, yagM gene, yagN gene, intF gene, yagP gene, yagQ gene, yagR gene, yagS gene, yagT gene, yagU gene, ykgJ gene, yagV gene, yagW gene, yagX gene, yagY gene, yagZ gene, ykgK gene, ykgL gene, ykgM gene, eaeH gene, JW0292 gene, JW0293 gene, ykgA gene, ykgB gene, ykgI gene, merA gene, ykgD gene, ykgE gene, ykgF gene, ykgG gene, ykgH gene, betA gene, betB gene, betI gene, betT gene, yahA gene, yahB gene, yahC gene, yahD gene, yahE gene, yahF gene, yahG gene, yahH gene, arcM gene, yahJ gene, yahK gene, yahL gene, yahM gene, yahN gene, yahO gene, prpR gene, bcpA gene, prpC gene, prpD gene, prpE gene, codB gene, codA gene, cynR gene, cynT gene, cynS gene, cynX gene, lacA gene, lacY gene, lacZ gene, lacI gene, mhpR gene, mhpA gene, mhpB gene, mhpC gene, mhpD gene, mhpF gene, mhpE gene, mhpT gene, yaiL gene, yaiM gene, adhC gene, yaiN gene, yaiO gene, JW0350 gene, yi2A gene, yi22 gene, yi24 gene, yi23 gene, yaiP gene, yaiS gene, tauA gene, tauB gene, tauC gene, ssiD gene, yaiT gene, JW0363 gene, JW0364 gene, yaiU gene, yaiV gene, ampH gene, sbmA gene, yaiW gene, yaiY gene, yaiZ gene, ddlA gene, yaiB gene, phoA gene, psiF gene, yaiC gene, ybbO gene, tesA gene, ybbA gene, ybbP gene, rhsD gene, ybbC gene, rhsE gene, ybbD gene, JW0490 gene, ybbB gene, ybbS gene, ybbT gene, ybbU gene, ybbQ gene, ybbV gene, allP gene, allA gene, ybbY gene, ybbZ gene, ylbA gene, allC gene, ylbC gene, fdrA gene, ylbE gene, ylbE gene, ylbE gene, ylbF gene, arcC gene, intD gene, EXO_LAMBD gene, VRPP_LAMBD gene, JW0528 gene, JW0529 gene, VREN_LAMBD gene, emrE gene, ybcK gene, ybcL gene, ybcM gene, ybcN gene, ninE gene, ybcO gene, rus gene, ybcQ gene, JW0539.5 gene, nmpC gene, vlyS gene, ybcS gene, ybcT gene, vboR gene, ybcV gene, ybcW gene, nohB gene, ybcX gene, ybcY gene, JW0552 gene, appY gene, ompT gene, envY gene, ybcH gene, nfrA gene, nfrB gene, cusS gene, cusR gene, cusC gene, ylcC gene, cusB gene, cusA gene, pheP gene, ybdG gene, nfnB gene, ybdF gene, ybdJ gene, ybdK gene, hokE gene, yi81 gene, yi82 gene, ymcC gene, ymcD gene, cspH gene, cspG gene, sfa gene, yccL gene, yccM gene, torS gene, torT gene, torR gene, torC gene, torA gene, torD gene, yccD gene, cbpA gene, yccE gene, agp gene, yccJ gene, wrbA gene, yciG gene, ycdG gene, JW0992 gene, JW0993 gene, JW0994 gene, ycdK gene, JW0996 gene, JW0997 gene, ycdC gene, putA gene, yzpU gene, putP gene, JW1002 gene, ycdO gene, ycdB gene, phoH gene, ycdP gene, ycdQ gene, ycdR gene, ycdR gene, ycdS gene, ycdT gene, JW1012 gene, JW1013 gene, JW1014 gene, ycdU gene, ymfD gene, ymfE gene, lit gene, intE gene, VXIS_BPP21 gene, ymfH gene, ymfI gene, ymfJ gene, RPC2_BPP22 gene, JW1132 gene, ymfL gene, ymfM gene, ymfN gene, ymfR gene, ymfO gene, JW1138 gene, JW1139 gene, ycfK gene, ymfS gene, ycfA gene, ycfE gene, pin gene, mcrA gene, JW1146 gene, ycgW gene, ycgX gene, ycgE gene, JW1150 gene, ycgZ gene, ymgA gene, JW1153 gene, ymgC gene, yahA gene, JW1156 gene, JW1157 gene, aidA gene, ymgD gene, JW1160 gene, JW1161 gene, JW1162 gene, ydfHl gene, ydfZ gene, ydfI gene, shiA gene, JW1537 gene, tnpR gene, ydfM gene, Y314_LAMBD gene, nohA gene, ydfO gene, yccL gene, cspI gene, ydfR gene, vlyS gene, cspB gene, cspF gene, regQ_LAMBD gene, JW1552 gene, rem gene, hokD gene, relE gene, relB gene, ydfV gene, flxA gene, ydfW gene, ydfX gene, dicC gene, sdaC gene, yqeH gene, yqeI gene, yqeJ gene, yqeK gene, ygeF gene, ygeG gene, ygeH gene, ygeI gene, JW2822 gene, ygeK gene, JW2824 gene, JW2825 gene, JW2830 gene, ygeP gene, JW2832 gene, nlpD gene, yagR gene, ygeT gene, JW2836 gene, ygeV gene, ygeW gene, dpaL gene, ygeY gene, ygeZ gene, arcL gene, yqeB gene, JW2844 gene, ygfJ gene, gltD gene, JW2847 gene, ygfM gene, yagR gene, ygfO gene, ygfP gene, ygfQ gene, ygfR gene, ygfS gene, ygfT gene, pbuX gene, idi gene, epsM gene, exeL gene, exeC gene, JW2938 gene, JW2939 gene, JW2940 gene, JW2941 gene, yghK gene, glcB gene, glcG gene, glcF gene, glcD gene, glcC gene, JW2948 gene, yghQ gene, yghR gene, yghS gene, yghT gene, yihL gene, yihM gene, yihN gene, yshA gene, yihO gene, yihP gene, yihQ gene, yihR gene, yihS gene, yihT gene, yihU gene, yihV gene, yihW gene, yihX gene, rbn gene, yihZ gene, yiiD gene, yiiE gene, yiiF gene, yiiG gene, frvR gene, frvX gene, frvB gene, frvA gene, yiiL gene, rhaD gene, rhaA gene, rhaB gene, rhaS gene, rhaR gene, rhaT gene, ptsA gene, JW3920 gene, frwC gene, frwB gene, pflD gene, pflC gene, frwD gene, yijO gene, yijP gene, JW3986 gene, yjbF gene, yjbG gene, yjbH gene, JW3989.5 gene, yjbA gene, xylE gene, malG gene, malF gene, malE gene, malK gene, lamB gene, malM gene, yjbI gene, yjcP gene, yjcQ gene, yjcR gene, yjcS gene, alsK gene, alsE gene, alsC gene, alsA gene, alsB gene, phnQ gene, phnP gene, phnO gene, phnN gene, phnM gene, phnL gene, phnK gene, phnJ gene, phnI gene, phnH gene, phnG gene, phnF gene, phnE gene, phnD gene, phnC gene, phnB gene, phnA gene, yjdA gene, yjcZ gene, yidF gene, yidG gene, yidH gene, yidI gene, yidJ gene, yidK gene, yidL gene, JW3657 gene, glvG gene, glvB gene, glvC gene, yidP gene, yidE gene, yidQ gene, yidR gene, yidS gene, dgoT gene, dgoA gene, dgoK gene, dgoR gene, yidW gene, yidX gene, yidA gene, yidB gene, asnA gene, yieM gene, JW3724 gene, yieN gene, kup gene, rbsD gene, rbsA gene, rbsC gene, rbsB gene, rbsK gene, rbsR gene, yieO gene, yecT gene, flhE gene, flhA gene, flhB gene, cheZ gene, cheY gene, cheB gene, cheR gene, tap gene, tar gene, cheW gene, cheA gene, motB gene, motA gene, flhC gene, flhD gene, JW1882 gene, JW1883 gene, yecG gene, otsA gene, otsB gene, araH gene, araG gene, araF gene, yecI gene, yecJ gene, JW1892 gene, ftn gene, yecH gene, tyrP gene, uvrC gene, uvrY gene, yecF gene, sdiA gene, yecC gene, yecS gene, yedO gene, fliY gene, fliZ gene, fliA gene, fliC gene, fliD gene, fliS gene, fliT gene, amyA gene, yedD gene, yedE gene, yedF gene, yedK gene, yedL gene, yedN gene, yedM gene, fliE gene, fliF gene, fliG gene, fliH gene, fliI gene, fliJ gene, fliK gene, fliL gene, fliM gene, fliN gene, fliO gene, fliP gene, fliQ gene, fliR gene, rcsA gene, dsrB gene, JW1937 gene, yedA gene, vsr gene, dcm gene, yedJ gene, JW1946 gene, ompC gene, JW1948 gene, yedS gene, yedU gene, yedV gene, copR gene, yedX gene, JW1954 gene, JW1955 gene, JW1956 gene, JW1974 gene, JW1979 gene, JW1980 gene, yeeP gene, flu gene, JW1983 gene, yeeS gene, yeeT gene, yeeU gene, yeeV gene, yeeW gene, yefJ gene, JW2013 gene, yefJ gene, yefI gene, wbbJ gene, yefG gene, rfc gene, glf gene, rfbX gene, rfbC gene, rfbA gene, rfbD gene, rfbB gene, intA gene, yfjH gene, alpA gene, yfjI gene, JW2606 gene, yfjJ gene, yfjK gene, yfjL gene, yfjM gene, yfjN gene, yfjO gene, yfjP gene, yfjQ gene, yfjR gene, ypjK gene, yfjS gene, yfjT gene, yfjU gene, yfjV gene, JW2622 gene, yfjW gene, JW2623.5 gene, yfjX gene, yfjY gene, yfjZ gene, ypjF gene, ypjA gene, JW2629 gene, JW2630 gene, JW2631 gene, JW2632 gene, JW2633 gene, JW2634 gene, ygaE gene, yzzM gene, yqaE gene, JW2642 gene, ygaP gene, stpA gene, JW2645 gene, ygaC gene, ygaM gene, nrdH gene, nrdI gene, nrdE gene, proV gene, proW gene, proX gene, JW2655 gene, JW2656 gene, ygaZ gene, ygaH gene, srlA gene, srlB gene, srlD gene, gutM gene, srlR gene, gutQ gene, gltF gene, yhcA gene, yhcD gene, yhcE gene, yhcE gene, yhcF gene, yhcG gene, yhcH gene, nanK gene, nanE gene, yegE gene, alkA gene, yegD gene, JW2055 gene, JW2056 gene, JW2057 gene, JW2058 gene, yegM gene, yegN gene, yegO gene, yegB gene, baeS gene, baeR gene, JW2065 gene, yegQ gene, ogrK gene, JW2068 gene, JW2069 gene, yegS gene, gatR gene, JW2072 gene, JW2073 gene, gatR gene, gatD gene, gatC gene, gatB gene, gatA gene, gatZ gene, gatY gene, fbaB gene, xegT gene, yegU gene, yegV gene, yegW gene, yegX gene, molR gene, yehI gene, yehK gene, yehL gene, yehO gene, yehP gene, yehQ gene, yehR gene, yehS gene, yehT gene, yehU gene, yehV gene, yehW gene, yehX gene, yehY gene, yehZ gene, bglX gene, dld gene, pbpG gene, yohC gene, yeiI gene, yeiJ gene, yeiK gene, yeiL gene, yeiM gene, yeiN gene, yeiC gene, cmtA gene, cmtB gene, intB gene, JW4228 gene, yjgW gene, yjgX gene, yjgY gene, yjgZ gene, yi41 gene, yi42 gene, yjhB gene, yjhC gene, yjhD gene, yjhE gene, yi91 gene, JW4244 gene, JW4245 gene, JW4246 gene, yjhU gene, yjhF gene, yjhG gene, yjhH gene, yjhI gene, sgcR gene, sgcE gene, sgcA gene, sgcQ gene, sgcC gene, JW4266.5 gene, sgcX gene, yjhP gene, yjhQ gene, JW4269.5 gene, JW4270 gene, JW4270.5 gene, yjhR gene, yjhS gene, yjhT gene, yjhA gene, fimB gene, fimE gene, fimA gene, fimI gene, fimC gene, fimD gene, fimF gene, fimG gene, fimH gene, gntP gene, uxuA gene, uxuB gene, uxuR gene, yjiC gene, yjiD gene, yjiE gene, iadA gene, yjiG gene, yjiH gene, yjiI gene, yjiJ gene, yjiK gene, JW4296.5 gene, yjiL gene, yjiM gene, yjiN gene, yjiO gene, yjiP gene, yjiQ gene, yjiR gene, yjiS gene, yjiT gene, yjiV gene, mcrD gene, mcrC gene, mcrB gene, yjiW gene, hsdS gene, hsdM gene, hsdR gene, mrr gene, yjiA gene, yjiX gene, yjiY gene, tsr gene, yjjL gene, JW4320 gene, yjjM gene, yjjN gene, mdoB gene, yjjA gene, kdpF gene, ybfA gene, rhsC gene, JW0690 gene, ybfb gene, rhsA gene, ybfC gene, ybfL gene, ybfD gene, ybgA gene, yjfI gene, yjfJ gene, yjfK gene, yjfL gene, yjfM gene, yjfC gene, aidB gene, yjfN gene, yjfO gene, yjfP gene, yjfQ gene, yjfR gene, sgaT gene, sgaB gene, sgaA gene, sgaH gene, sgaU gene, rhsB gene, JW3448 gene, yhhH gene, yibA gene, yhhI gene, yhhJ gene, yhiH gene, yhiI gene, yhiJ gene, yhiK gene, yhiL gene, yhiM gene, yhiN gene, JW0782 gene, ybiA gene, dinG gene, ybiB gene, ybiC gene, ybiJ gene, ybiI gene, ybiX gene, ybiL gene, ybiM gene, ybiN gene, ybiO gene, glnQ gene, glnP gene, glnH gene, yliA gene, yliB gene, yliC gene, yliD gene, JWO817 gene, JWO818 gene, yliG gene, yliH gene, yliI gene, yliJ gene, dacC gene, deoR gene, ybjG gene, ybjC gene, mdaA gene, rimK gene, ybjN gene, potF gene, potG gene, potH gene, potI gene, ybjO gene, ybjF gene, artJ gene, artM gene, artQ gene, artI gene, artP gene, ybjP gene, JW0850 gene, JW0851 gene, JW0852 gene, ybjT gene and ltaA gene, or homologous gene thereof.

26. The E. coli mutant strain according to claim 25 comprising chromosomal DNA that does not comprise DNA having the nucleotide sequences as shown in [1] to [43] of SEQ ID NO: 1 or DNA equivalent thereto.
[1] a nucleotide sequence of nucleotides 243965 to 253410
[2] a nucleotide sequence of nucleotides 261964 to 387531
[3] a nucleotide sequence of nucleotides 389139 to 403703
[4] a nucleotide sequence of nucleotides 518030 to 532711
[5] a nucleotide sequence of nucleotides 535505 to 550215
[6] a nucleotide sequence of nucleotides 563941 to 608118
[7] a nucleotide sequence of nucleotides 728821 to 739593
[8] a nucleotide sequence of nucleotides 832552 to 848089
[9] a nucleotide sequence of nucleotides 867638 to 883473
[10] a nucleotide sequence of nucleotides 890998 to 909379
[11] a nucleotide sequence of nucleotides 1048888 to 1097019
[12] a nucleotide sequence of nucleotides 1198106 to 1225146
[13] a nucleotide sequence of nucleotides 1630912 to 1641038
[14] a nucleotide sequence of nucleotides 1642632 to 1650222
[15] a nucleotide sequence of nucleotides 1964524 to 1993075
[16] a nucleotide sequence of nucleotides 1996662 to 2028209
[17] a nucleotide sequence of nucleotides 2033449 to 2044376
[18] a nucleotide sequence of nucleotides 2069149 to 2081926
[19] a nucleotide sequence of nucleotides 2104393 to 2116064
[20] a nucleotide sequence of nucleotides 2146264 to 2187855
[21] a nucleotide sequence of nucleotides 2200669 to 2229850
[22] a nucleotide sequence of nucleotides 2255895 to 2263491
[23] a nucleotide sequence of nucleotides 2755677 to 2789480
[24] a nucleotide sequence of nucleotides 2795174 to 2800890
[25] a nucleotide sequence of nucleotides 2804308 to 2810147
[26] a nucleotide sequence of nucleotides 2825314 to 2830262
[27] a nucleotide sequence of nucleotides 2985362 to 3033128
[28] a nucleotide sequence of nucleotides 3077085 to 3078916
[29] a nucleotide sequence of nucleotides 3110110 to 3134341
[30] a nucleotide sequence of nucleotides 3360737 to 3370547
[31] a nucleotide sequence of nucleotides 3618576 to 3636916
[32] a nucleotide sequence of nucleotides 3854662 to 3865831
[33] a nucleotide sequence of nucleotides 3867102 to 3877010
[34] a nucleotide sequence of nucleotides 3926659 to 3938878
[35] a nucleotide sequence of nucleotides 4059898 to 4079659
[36] a nucleotide sequence of nucleotides 4086451 to 4099982
[37] a nucleotide sequence of nucleotides 4139232 to 4149709
[38] a nucleotide sequence of nucleotides 4235359 to 4251735
[39] a nucleotide sequence of nucleotides 4298977 to 4311511
[40] a nucleotide sequence of nucleotides 4313318 to 4329721
[41] a nucleotide sequence of nucleotides 4409533 to 4423151
[42] a nucleotide sequence of nucleotides 4496202 to 4509534
[43] a nucleotide sequence of nucleotides 4517876 to 4599637

27. The E. coli mutant strain according to claim 26 comprising chromosomal DNA that does not comprise ygiS gene, ygiT gene, ygiU gene, JW2991 gene, ygiW gene, ygiX gene, ygiY gene, ygiZ gene, mdaB gene and ygiN gene, or homologous gene thereof.

28. The E. coli mutant strain according to claim 27 comprising chromosomal DNA that does not comprise DNA having a nucleotide sequence comprising nucleotides 3165628 to 3172940 of SEQ ID NO: 1 or DNA equivalent thereto.

29. The E. coli mutant strain according to claim 28 comprising chromosomal DNA that does not comprise ybeL gene, ybeQ gene, ybeR gene, ybeS gene, ybeT gene, ybeU gene, ybeV gene, ybew gene, ybeK gene, gltL gene, gltK gene, gltJ gene, ybeJ gene and JW0651 gene, or homologous gene thereof.

30. The E. coli mutant strain according to claim 29 comprising chromosomal DNA that does not comprise DNA having a nucleotide sequence comprising nucleotides 675104 to 689374 of SEQ ID NO: 1 or DNA equivalent thereto.

31. The E. coli mutant strain according to claim 30 comprising chromosomal DNA that does not comprise yfcC gene, JW2296 gene, yfcE gene, yfcF gene, yfcG gene, folX gene, JW2301 gene, yfcI gene, hisP gene, hisM gene, hisQ gene, hisJ gene, argT gene, yfdB gene, JW2346 gene, yfdH gene, JW2348 gene, yfdK gene, yfdL gene, yfdM gene, xylU gene, yfdN gene, yfdO gene, JW2356 gene, JW2357 gene, JW2358 gene, JW2359 gene, JW2360 gene, JW2378 gene, yqhT gene, ptwC gene and ptwB gene, or homologous gene thereof.

32. The E. coli mutant strain according to claim 31 comprising chromosomal DNA that does not comprise DNA having the nucleotide sequences as shown in [1] to [3] below of SEQ ID NO: 1 or DNA equivalent thereto.
[1] a nucleotide sequence of nucleotides 2423365 to 2434098
[2] a nucleotide sequence of nucleotides 2472852 to 2482482
[3] a nucleotide sequence of nucleotides 2505075 to 2514557

33. The E. coli mutant strain according to claim 32 comprising chromosomal DNA that does not comprise pinO gene, gspA gene, gspC gene, gspD gene, gspE gene, hofF gene, hofG gene, hofH gene, gspI gene, gspJ gene, gspK gene, gspL gene, pshM gene, hofD gene, bfr gene, yheA gene and chiA gene, or homologous gene thereof.

34. The E. coli mutant strain according to claim 33 comprising chromosomal DNA that does not comprise DNA having a nucleotide sequence comprising nucleotides 3453021 to 3469366 of SEQ ID NO: 1 or DNA equivalent thereto.

35. The E. coli mutant strain according to claim 34 comprising chromosomal DNA that does not comprise elaB gene, elaA gene, elaC gene, elaD gene, yfbK gene, yfbL gene, yfbM gene, yfbN gene, JW2269 gene and JW2270 gene, or homologous gene thereof.

36. The E. coli mutant strain according to claim 35 comprising chromosomal DNA that does not comprise DNA having a nucleotide sequence comprising nucleotides 2386262 to 2395471 of SEQ ID NO: 1 or DNA equivalent thereto.

37. The E. coli mutant strain according to claim 36 comprising chromosomal DNA that does not comprise yhdJ gene, yhdU gene, envR gene, acrE gene, envD gene, yhdV gene, yhdW gene, yhdX gene and yhdY gene, or homologous gene thereof.

38. The E. coli mutant strain according to claim 37 comprising chromosomal DNA that does not comprise DNA having a nucleotide sequence comprising nucleotides 3411160 to 3420878 of SEQ ID NO: 1 or DNA equivalent thereto.

39. The E. coli mutant strain according to claim 38 comprising chromosomal DNA that does not comprise chpA gene or homologous gene thereof.

40. The E. coli mutant strain according to claim 39 comprising chromosomal DNA that does not comprise DNA having a nucleotide sequence comprising nucleotides 2910274 to 2910573 of SEQ ID NO: 1 or DNA equivalent thereto.

41. The E. coli mutant strain according to claim 40 comprising chromosomal DNA that does not comprise fhuA gene, fhuC gene, fhuD gene fhuB gene, or homologous gene thereof.

42. The E. coli mutant strain according to claim 41 comprising chromosomal DNA that does not comprise DNA having a nucleotide sequence comprising nucleotides 167065 to 172979 of SEQ ID NO: 1 or DNA equivalent thereto.

43. The E. coli mutant strain according to claim 42 obtained via modification by a method selected from among the following [1] to [5]:
[1] a method for reducing or removing at least one mechanism for regulating biosynthesis of the useful substance;
[2] a method for increasing the expression level of at least one enzyme associated with biosynthesis of the useful substance;
[3] a method for increasing the copy number of at least one enzyme gene associated with biosynthesis of the useful substance;
[4] a method for attenuating or blocking at least one metabolic pathway which branches from the biosynthetic pathway of the useful substance into metabolites other than the useful substance; or
[5] a method for selecting a strain that exhibits higher resistance to an analogue of a useful substance than a wild-type E. coli strain.

44. The E. coli mutant strain according to claim 43, wherein the E. coli strain is the E. coli K-12, B, or W strain.

45. The E. coli mutant strain according to claim 44, wherein the E. coli K-12 strain is the E. coli W3110 strain (ATCC27325) or the E. coli MG1655 strain (ATCC47076).

46. A method for producing a useful substance comprising culturing an E. coli mutant strain according to claim 45 in a medium so as to generate and accumulate such useful substance in the culture and recovering the useful substance from the culture.

47. The method according to claim 46, wherein the useful substance is selected from the group consisting of proteins, peptides, amino acids, nucleic acids, vitamins, saccharides, organic acids, and lipids.

The application's sequence listing, which the Patent Office published only in electronic form, follows.

SEQUENCE LISTING (31 sequences)

SEQ ID NO: 1 - DNA, 4641433 bp, Escherichia coli W3110 (residues 1-1,547,145 of 4,641,433)
atgcgagtgttgaagttcggcggtacatcagtggcaaatgcagaacgttttctgcgtgttgccgatattctggaaagcaatgccaggcaggggcaggtggccaccgtcctctctgcccccgccaaaatcaccaaccacctggtggcgatgattgaaaaaaccattagcggccaggatgctttacccaatatcagcgatgccgaacgtatttttgccgaacttttgacgggactcgccgccgcccagccggggttcccgctggcgcaattgaaaactttcgtcgatcaggaatttgcccaaataaaacatgtcctgcatggcattagtttgttggggcagtgcccggatagcatcaacgctgcgctgatttgccgtggcgagaaaatgtcgatcgccattatggccggcgtattagaagcgcgcggtcacaacgttactgttatcgatccggtcgaaaaactgctggcagtggggcattacctcgaatctaccgtcgatattgctgagtccacccgccgtattgcggcaagccgcattccggctgatcacatggtgctgatggcaggtttcaccgccggtaatgaaaaaggcgaactggtggtgcttggacgcaacggttccgactactctgctgcggtgctggctgcctgtttacgcgccgattgttgcgagatttggacggacgttgacggggtctatacctgcgacccgcgtcaggtgcccgatgcgaggttgttgaagtcgatgtcctaccaggaagcgatggagctttcctacttcggcgctaaagttcttcacccccgcaccattacccccatcgcccagttccagatcccttgcctgattaaaaataccggaaatcctcaagcaccaggtacgctcattggtgccagccgtgatgaagacgaattaccggtcaagggcatttccaatctgaataacatggcaatgttcagcgtttctggtccggggatgaaagggatggtcggcatggcggcgcgcgtctttgcagcgatgtcacgcgcccgtatttccgtggtgctgattacgcaatcatcttccgaatacagcatcagtttctgcgttccacaaagcgactgtgtgcgagctgaacgggcaatgcaggaagagttctacctggaactgaaagaaggcttactggagccgctggcagtgacggaacggctggccattatctcggtggtaggtgatggtatgcgcaccttgcgtgggatctcggcgaaattctttgccgcactggcccgcgccaatatcaacattgtcgccattgctcagggatcttctgaacgctcaatctctgtcgtggtaaataacgatgatgcgaccactggcgtgcgcgttactcatcagatgctgttcaataccgatcaggttatcgaagtgtttgtgattggcgtcggtggcgttggcggtgcgctgctggagcaactgaagcgtcagcaaagctggctgaagaataaacatatcgacttacgtgtctgcggtgttgccaactcgaaggctctgctcaccaatgtacatggccttaatctggaaaactggcaggaagaactggcgcaagccaaagagccgtttaatctcgggcgcttaattcgcctcgtgaaagaatatcatctgctgaacccggtcattgttgactgcacttccagccaggcagtggcggatcaatatgccgacttcctgcgcgaaggtttccacgttgtcacgccgaacaaaaaggccaacacctcgtcgatggattactaccatcagttgcgttatgcggcggaaaaatcgcggcgtaaattcctctatgacaccaacgttggggctggattaccggttattgagaacctgcaaaatctgctcaatgcaggtgatgaattgatgaagttctccggcattctttctggttcgctttcttatatcttcggcaagttagacgaaggcatgagtttctccgaggcgaccacgctggcgcgggaaatgggttataccgaaccggacccgcgagatgatctttctggtatggatgtggcgcgtaaactattgattctcgctcgtgaaacgggacgtgaactggagctggcggatattgaaattgaacctgtgctgcccgcagagtttaacgccgagggtgatgttgccgcttttatggcgaatctgtcacaactcgacgatctctttgccgcgcgcgtggcgaaggcccgtgatgaaggaaaagttttgcgctatgttggcaatattgatgaagatggcgtctgccgcgtgaagattgccgaagtggatggtaatgatccgctgttcaaagtgaaaaatggcgaaaacgccctggccttctatagccactattatcagccgctgccgttggtactgcgcggatatggtgcgggcaatgacgttacagctgccggtgtctttgctgatctgctacgtaccctctcatggaagttaggagtctgacatggttaaagtttatgccccggcttccagtgccaatatgagcgtcgggtttgatgtgctcggggcggcggtgacacctgttgatggtgcattgctcggagatgtagtcacggttgaggcggcagagacattcagtctcaacaacctcggacgctttgccgataagctgccgtcagaaccacgggaaaatatcgtttatcagtgctgggagcgtttttgccaggaactgggtaagcaaattccagtggcgatgaccctggaaaagaatatgccgatcggttcgggcttaggctccagtgcctgttcggtggtcgcggcgctgatggcgatgaatgaacactgcggcaagccgcttaatgacactcgtttgctggctttgatgggcgagctggaaggccgtatctccggcagcattcattacgacaacgtggcaccgtgttttctcggtggtatgcagttgatgatcgaagaaaacgacatcatcagccagcaagtgccagggtttgatgagtggctgtgggtgctggcgtatccggggattaaagtctcgacggcagaagccagggctattttaccggcgcagtatcgccgccaggattgcattgcgcacgggcgacatctggcaggcttcattcacgcctgctattcccgtcagcctgagcttgccgcgaagctgatgaaagatgttatcgctgaaccctaccgtgaacggttactgccaggcttccggcaggcgcggcaggcggtcgcggaaatcggcgcggtagcgagcggtatctccggctccggcccgaccttgttcgctctgtgtgacaagccggaaaccgcccagcgcgttgccgactggttgggtaagaactacctgcaaaatcaggaaggttttgttcatatttgccggctggatacggcgggcgcacgagtactggaaaactaaatgaaactctacaatctgaaagatcacaacgagcaggtcagctttgcgcaagccgtaacccaggggttgggcaaaaatcaggggctgttttttccgcacgacctgccggaattcagcctgactgaaattgatgagatgctgaagctggattttgtcacccgcagtgcgaagatcctctcggcgtttattggtgatgaaatcccacaggaaatcctggaagagcgcgtgcgcgcggcgtttgccttcccggctccggtcgccaatgttgaaagcgatgtcggttgtctggaattgttccacgggccaacgctggcatttaaagatttcggcggtcgctttatggcacaaatgctgacccatattgcgggtgataagccagtgaccattctgaccgcgacctccggtgataccggagcggcagtggctcatgctttctacggtttaccgaatgtgaaagtggttatcctctatccacgaggcaaaatcagtccactgcaagaaaaactgttctgtacattgggcggcaatatcgaaactgttgccatcgacggcgatttcgatgcctgtcaggcgctggtgaagcaggcgtttgatgatgaagaactgaaagtggcgctagggttaaactcggctaactcgattaacatcagccgtttgctggcgcagatttgctactactttgaagctgttgcgcagctgccgcaggagacgcgcaaccagctggttgtctcggtgccaagcggaaacttcggcgatttgacggcgggtctgctggcgaagtcactcggtctgccggtgaaacgttttattgctgcgaccaacgtgaacgataccgtgccacgtttcctgcacgacggtcagtggtcacccaaagcgactcaggcgacgttatccaacgcgatggacgtgagtcagccgaacaactggccgcgtgtggaagagttgttccgccgcaaaatctggcaactgaaagagctgggttatgcagccgtggatgatgaaaccacgcaacagacaatgcgtgagttaaaagaactgggctacacttcggagccgcacgctgccgtagcttatcgtgcgctgcgtgatcagttgaatccaggcgaatatggcttgttcctcggcaccgcgcatccggcgaaatttaaagagagcgtggaagcgattctcggtgaaacgttggatctgccaaaagagctggcagaacgtgctgatttacccttgctttcacataatctgcccgccgattttgctgcgttgcgtaaattgatgatgaatcatcagtaaaatctattcattatctcaatcaggccgggtttgcttttatgcagcccggcttttttatgaagaaattatggagaaaaatgacagggaaaaaggagaaattctcaataaatgcggtaacttagagattaggattgcggagaataacaaccgccgttctcatcgagtaatctccggatatcgacccataacgggcaatgataaaaggagtaacctgtgaaaaagatgcaatctatcgtactcgcactttccctggttctggtcgctcccatggcagcacaggctgcggaaattacgttagtcccgtcagtaaaattacagataggcgatcgtgataatcgtggctattactgggatggaggtcactggcgcgaccacggctggtggaaacaacattatgaatggcgaggcaatcgctggcacctacacggaccgccgccaccgccgcgccaccataagaaagctcctcatgatcatcacggcggtcatggtccaggcaaacatcaccgctaaatgacaaatgccgggtaacaatccggcattcagcgcctgatgcgacgctggcgcgtcttatcaggcctacgttaattctgcaatatattgaatctgcatgcttttgtaggcaggataaggcgttcacgccgcatccggcattgactgcaaacttaacgctgctcgtagcgtttaaacaccagttcgccattgctggaggaatcttcatcaaagaagtaaccttcgctattaaaaccagtcagttgctctggtttggtcagccgattttcaataatgaaacgactcatcagaccgcgtgctttcttagcgtagaagctgatgatcttaaatttgccgttcttctcatcgaggaacaccggcttgataatctcggcattcaatttcttcggcttcaccgatttaaaatactcatctgacgccagattaatcaccacattatcgccttgtgctgcgagcgcctcgttcagcttgttggtgatgatatctccccagaattgatacagatctttccctcgggcattctcaagacggatccccatttccagacgataaggctgcattaaatcgagcgggcggagtacgccatacaagccggaaagcattcgcaaatgctgttgggcaaaatcgaaatcgtcttcgctgaaggtttcggcctgcaagccggtgtagacatcacctttaaacgccagaatcgcctggcgggcattcgccggcgtgaaatctggctgccagtcatgaaagcgagcggcgttgatacccgccagtttgtcgctgatgcgcatcagcgtgctaatctgcggaggcgtcagtttccgcgcctcatggatcaactgctgggaattgtctaacagctccggcagcgtatagcgcgtggtggtcaacgggctttggtaatcaagcgttttcgcaggtgaaataagaatcagcatatccagtccttgcaggaaatttatgccgactttagcaaaaaatgagaatgagttgatcgatagttgtgattactcctgcgaaacatcatcccacgcgtccggagaaagctggcgaccgatatccggataacgcaatggatcaaacaccgggcgcacgccgagtttacgctggcgtagataatcactggcaatggtatgaaccacaggcgagagcagtaaaatggcggtcaaattggtaatagccatgcaggccattatgatatctgccagttgccacatcagcggaaggcttagcaaggtgccgccgatgaccgttgcgaaggtgcagatccgcaaacaccagatcgctttagggttgttcaggcgtaaaaagaagagattgttttcggcataaatgtagttggcaacgatggagctgaaggcaaacagaataaccacaagggtaacaaactcagcaccccaggaacccattagcacccgcatcgccttctggataagctgaataccttccagcggcatgtaggttgtgccgttacccgccagtaatatcagcatggcgcttgccgtacagatgaccagggtgtcgataaaaatgccaatcatctggacaatcccttgcgctgccggatgcggaggccaggacgccgctgccgctgccgcgtttggcgtcgaacccattcccgcctcattggaaaacatactgcgctgaaaaccgttagtaatcgcctggcttaaggtatatcccgccgcgccgcctgccgcttcctgccagccaaaagcactctcaaaaatagaccaaatgacgtggggaagttgcccgatattcattacgcaaattaccaggctggtcagtacccagattatcgccatcaacgggacaaagccctgcatgagccgggcgacgccatgaagaccgcgagtgattgccagcagagtaaagacagcgagaataatgcctgtcaccagcgggggaaaatcaaaagaaaaactcagggcgcgggcaacggcgttcgcttgaactccgctgaaaattatgccataggcgatgagcaaaaagacggcgaacagaacgcccatccagcgcatccccagcccgcgcgccatataccatgccggtccgccacgaaactgcccattgacgtcacgttctttataaagttgtgccagagaacattcggcaaacgaggtcgccatgccgataaacgcggcaacccacatccaaaagacggctccaggtccaccggcggtaatagccagcgcaacgccggccaggttgccgctacccacgcgcgccgcaagactggtacacaatgactgaaatgaggttaaaccgcctggctgtggatgaatgctatttttaagacttttgccaaactggcggatgtagcgaaactgcacaaatccggtgcgaaaagtgaaccaacaacctgcgccgaagagcaggtaaatcattaccgatccccaaaggacgctgttaatgaaggagaaaaaatctggcatgcatatccctcttattgccggtcgcgatgactttcctgtgtaaacgttaccaattgtttaagaagtatatacgctacgaggtacttgataacttctgcgtagcatacatgaggttttgtataaaaatggcgggcgatatcaacgcagtgtcagaaatccgaaacagtctcgcctggcgataaccgtcttgtcggcggttgcgctgacgttgcgtcgtgatatcatcagggcagaccggttacatccccctaacaagctgtttaaagagaaatactatcatgacggacaaattgacctcccttcgtcagtacaccaccgtagtggccgacactggggacatcgcggcaatgaagctgtatcaaccgcaggatgccacaaccaacccttctctcattcttaacgcagcgcagattccggaataccgtaagttgattgatgatgctgtcgcctgggcgaaacagcagagcaacgatcgcgcgcagcagatcgtggacgcgaccgacaaactggcagtaaatattggtctggaaatcctgaaactggttccgggccgtatctcaactgaagttgatgcgcgtctttcctatgacaccgaagcgtcaattgcgaaagcaaaacgcctgatcaaactctacaacgatgctggtattagcaacgatcgtattctgatcaaactggcttctacctggcagggtatccgtgctgcagaacagctggaaaaagaaggcatcaactgtaacctgaccctgctgttctccttcgctcaggctcgtgcttgtgcggaagcgggcgtgttcctgatctcgccgtttgttggccgtattcttgactggtacaaagcgaataccgataagaaagagtacgctccggcagaagatccgggcgtggtttctgtatctgaaatctaccagtactacaaagagcacggttatgaaaccgtggttatgggcgcaagcttccgtaacatcggcgaaattctggaactggcaggctgcgaccgtctgaccatcgcaccggcactgctgaaagagctggcggagagcgaaggggctatcgaacgtaaactgtcttacaccggcgaagtgaaagcgcgtccggcgcgtatcactgagtccgagttcctgtggcagcacaaccaggatccaatggcagtagataaactggcggaaggtatccgtaagtttgctattgaccaggaaaaactggaaaaaatgatcggcgatctgctgtaatcattcttagcgtgaccgggaagtcggtcacgctacctcttctgaagcctgtctgtcactcccttcgcagtgtatcattctgtttaacgagactgtttaaacggaaaaatcttgatgaatactttacgtattggcttagtttccatctctgatcgcgcatccagcggcgtttatcaggataaaggcatccctgcgctggaagaatggctgacatcggcgctaaccacgccgtttgaactggaaacccgcttaatccccgatgagcaggcgatcatcgagcaaacgttgtgtgagctggtggatgaaatgagttgccatctggtgctcaccacgggcggaactggcccggcgcgtcgtgacgtaacgcccgatgcgacgctggcagtagcggaccgcgagatgcctggctttggtgaacagatgcgccagatcagcctgcattttgtaccaactgcgatcctttcgcgtcaggtgggcgtgattcgcaaacaggcgctgatccttaacttacccggtcagccgaagtctattaaagagacgctggaaggtgtgaaggacgctgagggtaacgttgtggtacacggtatttttgccagcgtaccgtactgcattcagttgctggaagggccatacgttgaaacggcaccggaagtggttgcagcattcagaccgaagagtgcaagacgcgacgttagcgaataaaaaaatccccccgagcggggggatctcaaaacaattagtgggattcaccaatcggcagaacggtgcgaccaaactgctcgttcagtacttcacccatcgccagatagattgcgctggcaccgcagatcagcccaatccagccggcaaagtggatgattgcggcgttaccggcaatgttaccgatcgccagcagggcaaacagcacggtcaggctaaagaaaacgaattgcagaacgcgtgcgcctttcagcgtgccgaagaacataaacagcgtaaatacgccccacagacccaggtagacaccaaggaactgtgcatttggcgcatcggtcagacccagtttcggcatcagcagaatcgcaaccagcgtcagccagaaagaaccgtaagaggtgaatgcggttaaaccgaaagtgttgccttttttgtactccagcagaccagcaaaaatttgcgcgatgccgccgtagaaaatgcccatggcaagaataataccgtccagagcgaaataacccacgttgtgcaggttaagcagaatggtggtcatgccgaagcccatcaggcccagcggtgccggattagccaacttagtgttgcccataattcctcaaaaatcatcatcgaatgaatggtgaaataatttccctgaataactgtagtgttttcagggcgcggcataataatcagccagtggggcagtgtctacgatcttttgaggggaaaatgaaaattttccccggtttccggtatcagacctgagtggcgctaaccatccggcgcaggcaggcgatttgcagtacggctggaatcgtcacgcgataggcgctgccgctgaccgctttaaccccatttagtgccgcacctacagggcctcccagccccgcgccgcgcagcaaaccatgcccaagtacgctcattgctgcgtgggtgcgtaaaatgcgggtcagttggctggaaagcaaatgcgacacaccttttgccaataatttgtctttcatcagcagcggcagcagctcttccagctcattcaccctggcatcgaccgcgtgcagaaactcctgcttatgttcctcgtccattttcttccaggtattacgcagaaattgttccagtaactgttgctcaatttcaaacgtagacatctctttgtcggctttcagcttcaatcgctttgaaacatcgagcaaaatggcccgatacaatttaccgtgtccgcgcagtttgttggcgatactatcgccaccaaaatgctgtaattctccggcaatcagctgccagttgcggcgatgttgctcgggatgcccttccatcgatttaaacagttcgttgcgcatcagtacgctggagaggcgagttttgcctttttcattatgggtgagcaatcgggcgaaatttgccaactgttcctcactacaatgctgaagaaaatccagatctgaatcattcaggtaattaacattcattttttgtggcttctatattctggcgttagtcgtcgccgataattttcagcgtggccatatccgatgagttcaccgtatgacccgaaaaggtgatttttgagacgcagcgtttattgtcgttatcgctgttaatgttgatccagtcagtggtttgcccttcttttatttctgaaggaatattcaggctctgactggcgctacgggcggctttgaaataaaccgatgcaccgcttaactgtaaatcgccatggtcggcagagagttgtatgcgtttcacaatgcgacaaacaggaagtttcagcgccagatcgttggtttcgttacgcggcattgcaatggcgccgaggagtttatggtcgtttgcctgcgccgtgcagcacagcatcaggctaatcgccaggctggcggaaatcgtaaaaacggatttcataaggattctcttagtgggaagaggtagggggatgaatacccactagtttactgctgataaagagaagattcaggcacgtaatcttttctttttattacaattttttgatgaatgccttggctgcgattcattctttatatgaataaaattgctgtcaattttacgtcttgtcctgccatatcgcgaaatttctgcgcaaaagcacaaaaaatttttgcatctcccccttgatgacgtggtttacgaccccatttagtagtcaaccgcagtgagtgagtctgcaaaaaaatgaaattgggcagttgaaaccagacgtttcgcccctattacagactcacaaccacatgatgaccgaatatatagtggagacgtttagatgggtaaaataattggtatcgacctgggtactaccaactcttgtgtagcgattatggatggcaccactcctcgcgtgctggagaacgccgaaggcgatcgcaccacgccttctatcattgcctatacccaggatggtgaaactctagttggtcagccggctaaacgtcaggcagtgacgaacccgcaaaacactctgtttgcgattaaacgcctgattggtcgccgcttccaggacgaagaagtacagcgtgatgtttccatcatgccgttcaaaattattgctgctgataacggcgacgcatgggtcgaagttaaaggccagaaaatggcaccgccgcagatttctgctgaagtgctgaaaaaaatgaagaaaaccgctgaagattacctgggtgaaccggtaactgaagctgttatcaccgtaccggcatactttaacgatgctcagcgtcaggcaaccaaagacgcaggccgtatcgctggtctggaagtaaaacgtatcatcaacgaaccgaccgcagctgcgctggcttacggtctggacaaaggcactggcaaccgtactatcgcggtttatgacctgggtggtggtactttcgatatttctattatcgaaatcgacgaagttgacggcgaaaaaaccttcgaagttctggcaaccaacggtgatacccacctggggggtgaagacttcgacagccgtctgatcaactatctggttgaagaattcaagaaagatcagggcattgacctgcgcaacgatccgctggcaatgcagcgcctgaaagaagcggcagaaaaagcgaaaatcgaactgtcttccgctcagcagaccgacgttaacctgccatacatcactgcagacgcgaccggtccgaaacacatgaacatcaaagtgactcgtgcgaaactggaaagcctggttgaagatctggtaaaccgttccattgagccgctgaaagttgcactgcaggacgctggcctgtccgtatctgatatcgacgacgttatcctcgttggtggtcagactcgtatgccaatggttcagaagaaagttgctgagttctttggtaaagagccgcgtaaagacgttaacccggacgaagctgtagcaatcggtgctgctgttcagggtggtgttctgactggtgacgtaaaagacgtactgctgctggacgttaccccgctgtctctgggtatcgaaaccatgggcggtgtgatgacgacgctgatcgcgaaaaacaccactatcccgaccaagcacagccaggtgttctctaccgctgaagacaaccagtctgcggtaaccatccatgtgctgcagggtgaacgtaaacgtgcggctgataacaaatctctgggtcagttcaacctagatggtatcaacccggcaccgcgcggcatgccgcagatcgaagttaccttcgatatcgatgctgacggtatcctgcacgtttccgcgaaagataaaaacagcggtaaagagcagaagatcaccatcaaggcttcttctggtctgaacgaagatgaaatccagaaaatggtacgcgacgcagaagctaacgccgaagctgaccgtaagtttgaagagctggtacagactcgcaaccagggcgaccatctgctgcacagcacccgtaagcaggttgaagaagcaggcgacaaactgccggctgacgacaaaactgctatcgagtctgcgctgactgcactggaaactgctctgaaaggtgaagacaaagccgctatcgaagcgaaaatgcaggaactggcacaggtttcccagaaactgatggaaatcgcccagcagcaacatgcccagcagcagactgccggtgctgatgcttctgcaaacaacgcgaaagatgacgatgttgtcgacgctgaatttgaagaagtcaaagacaaaaaataatcgccctataaacgggtaattatactgacacgggcgaaggggaatttcctctccgcccgtgcattcatctaggggcaatttaaaaaagatggctaagcaagattattacgagattttaggcgtttccaaaacagcggaagagcgtgaaatcagaaaggcctacaaacgcctggccatgaaataccacccggaccgtaaccagggtgacaaagaggccgaggcgaaatttaaagagatcaaggaagcttatgaagttctgaccgactcgcaaaaacgtgcggcatacgatcagtatggtcatgctgcgtttgagcaaggtggcatgggcggcggcggttttggcggcggcgcagacttcagcgatatttttggtgacgttttcggcgatatttttggcggcggacgtggtcgtcaacgtgcggcgcgcggtgctgatttacgctataacatggagctcaccctcgaagaagctgtacgtggcgtgaccaaagagatccgcattccgactctggaagagtgtgacgtttgccacggtagcggtgcaaaaccaggtacacagccgcagacttgtccgacctgtcatggttctggtcaggtgcagatgcgccagggattcttcgctgtacagcagacctgtccacactgtcagggccgcggtacgctgatcaaagatccgtgcaacaaatgtcatggtcatggtcgtgttgagcgcagcaaaacgctgtccgttaaaatcccggcaggggtggacactggagaccgcatccgtcttgcgggcgaaggtgaagcgggcgagcatggcgcaccggcaggcgatctgtacgttcaggttcaggttaaacagcacccgattttcgagcgtgaaggcaacaacctgtattgcgaagtcccgatcaacttcgctatggcggcgctgggtggcgaaatcgaagtaccgacccttgatggtcgcgtcaaactgaaagtgcctggcgaaacccagaccggtaagctattccgtatgcgcggtaaaggcgtcaagtctgtccgcggtggcgcacagggtgatttgctgtgccgcgttgtcgtcgaaacaccggtaggcctgaacgaaaggcagaaacagctgctgcaagagctgcaagaaagcttcggtggcccaaccggcgagcacaacagcccgcgctcaaagagcttctttgatggtgtgaagaagttttttgacgacctgacccgctaacctccccaaaagcctgcccgtgggcaggcctgggtaaaaatagggtgcgttgaagatatgcgagcacctgtaaagtggcggggatcactcccataagcgctaacttaagggttgtggtattacgcctgatatgatttaacgtgccgatgaattactctcacgataactggtcagcaattctggcccatattggtaagcccgaagaactggatacttcggcacgtaatgccggggctctaacccgccgccgcgaaattcgtgatgctgcaactctgctacgtctggggctggcttacggccccggggggatgtcattacgtgaagtcactgcatgggctcagctccatgacgttgcaacattatctgacgtggctctcctgaagcggctgcggaatgccgccgactggtttggcatacttgccgcacaaacacttgctgtacgcgccgcagttacgggttgtacaagcggaaagagattgcgtcttgtcgatggaacagcaatcagtgcgcccgggggcggcagcgctgaatggcgactacatatgggatatgatcctcatacctgtcagttcactgattttgagctaaccgacagcagagacgctgaacggctggaccgatttgcgcaaacggcagacgagatacgcattgctgaccggggattcggttcgcgtcccgaatgtatccgctcacttgcttttggagaagctgattatatcgtccgggttcactggcgaggattgcgctggttaactgcagaaggaatgcgctttgacatgatgggttttctgcgcgggctggattgcggtaagaacggtgaaaccactgtaatgataggcaattcaggtaataaaaaagccggagctccctttccggcacgtctcattgccgtatcacttcctcccgaaaaagcattaatcagtaaaacccgactgctcagcgagaatcgtcgaaaaggacgagtagttcaggcggaaacgctggaagcagcgggccatgtgctattgctaacatcattaccggaagatgaatattcagcagagcaagtggctgattgttaccgtctgcgatggcaaattgaactggcttttaagcggctcaaaagtttgctgcacctggatgctttgcgtgcaaaggaacctgaactcgcgaaagcgtggatatttgctaatctactcgccgcatttttaattgacgacataatccagccatcgctggatttcccccccagaagtgccggatccgaaaagaagaactaactcgttgtggagaataacaaaaatggtcatctggagcttacaggtggccattcgtgggacagtatccctgacagcctacaaaacgcaattgaagaacgcgaggcatcgtcttaacgaggcaccgaggcgtcgcattcttcagatggttcaacccttaagttagcgcttatgggatcactccccgccgttgctcttactcggattcgtaagccgtgaaaacagcaacctccgtctggccagttcggatgtgaacctcacagaggtcttttctcgttaccagcgccgccactacggcggtgatacagatgacgatcagggcgacaatcatcgccttatgctgcttcattgctctcttctccttgaccttacggtcagtaagaggcactctacatgtgttcagcatataggaggcctcgggttgatggtaaaatatcactcggggcttttctctatctgccgttcagctaatgcctgagacagacagcctcaagcacccgccgctattatatcgctctctttaacccattttgttttatcgattctaatcctgaagacgcctcgcatttttgtggcgtaattttttaatgatttaattatttaactttaatttatctcttcatcgcaattattgacgacaagctggattatttttgaaatattggcctaacaagcatcgccgactgacaacaaattaattattacttttcctaattaatccctcaggaatcctcaccttaagctatgattatctaggcttagggtcactcgtgagcgcttacagccgtcaaaaacgcatctcaccgctgatggcgcaaattcttcaatagctcgtaaaaaacgaattattcctacactataatctgattttaacgatgattcgtgcggggtaaaatagtaaaaacgatctattcacctgaaagagaaataaaaagtgaaacatctgcatcgattctttagcagtgatgcctcgggaggcattattcttatcattgccgctatcctggcgatgattatggccaacagcggcgcaaccagtggatggtatcacgactttctggagacgccggttcagctccgggttggttcactcgaaatcaacaaaaacatgctgttatggataaatgacgcgctgatggcggtatttttcctgttagtcggtctggaagttaaacgtgaactgatgcaaggatcgctagccagcttacgccaggccgcatttccagttatcgccgctattggtgggatgattgtgccggcattactctatctggcttttaactatgccgatccgattacccgcgaagggtgggcgatcccggcggctactgacattgcttttgcacttggtgtactggcgctgttgggaagtcgtgttccgttagcgctgaagatctttttgatggctctggctattatcgacgatcttggggccatcattatcatcgcattgttctacactaatgacttatcgatggcctctcttggcgtcgcggctgtagcaattgcggtactcgcggtattgaatctgtgtggtgcacgccgcacgggcgtctatattcttgttggcgtggtgttgtggactgcggtgttgaaatcgggggttcacgcaactctggcgggggtaattgtcggcttctttattcctttgaaagagaagcatgggcgttctccagcgaagcgactggagcatgtgttgcacccgtgggtggcgtatctgattttgccgctgtttgcatttgctaatgctggcgtttcactgcaaggcgtcacgctggatggcttgacctccattctgccattggggatcatcgctggcttgctgattggcaaaccgctggggattagtctgttctgctggttggcgctgcgtttgaaactggcgcatctgcctgagggaacgacttatcagcaaattatggtggtggggatcctgtgcggtatcggttttactatgtctatctttattgccagcctggcctttggtagcgtagatccagaactgattaactgggcgaaactcggtatcctggtcggttctatctcttcggcggtaattggatacagctggttacgcgttcgtttgcgtccatcagtttgacaggacggtttaccggggagccataaacggctcccttttcattgttatcagggagagaaatgagcatgtctcatatcaattacaaccacttgtattacttctggcatgtctataaagaaggttccgtggttggcgcagcggaggcgctttatttaactccacaaaccattaccggacagattcgagcgctggaagagcgcctgcaaggcaaattatttaaacgcaagggacgtggtctcgaacccagcgagctgggagaactggtctatcgctatgccgataaaatgttcaccttaagccaggaaatgctggatattgtgaactatcgcaaagaatccaatttattgtttgacgttggcgtggctgatgcactttccaaacgcctggtcagtagcgtacttaacgccgcagtggtagaaggcgagcccattcatcttcgctgcttcgaatccacccacgaaatgctgctggagcaattaagtcagcataaactggatatgatcatttctgactgtccgatagactctacgcagcaggaaggcctgttctccgtgagaattggcgaatgtggcgtgagtttctggtgtacaaatccaccaccagaaaaaccgttcccggcttgtctggaagaacggcgacttttgattcctgggcgacgttcaatgttagggcgcaaattgcttaactggtttaactcccagggattaaacgtagaaatcctcggcgagtttgatgatgccgctttgatgaaagcttttggtgcgatgcacaatgcaatcttcgttgccccaacgctttatgcatatgacttttatgccgataaaactgtcgtagaaattggtcgcgtcgagaatgtgatggaagagtaccatgctatttttgctgagcggatgattcagcacccggcggtacagcgaatctgcaatacggattattctgcgctttttagtccagcggtgcgttaatcggcagctcccccaaagttaaggtgggggagatagattagttgtacattaccacgattttgactcggctcattatttgcccgcttgagacattgtttccatatgtacgcgggcgaataaatagaggaatctgattacttccttcatggggatgctgaaaagagtagtaattgctggtaatgactccaacttattgatagtgttttatgttcagataatgcccgatgactttgtcatgcagctccaccgattttgagaacgacagcgacttccgtcccagccgtgccaggtgctgcctcagattcaggttatgccgctcaattcgctgcgtatatcgcttgctgattacgtgcagctttcccttcaggcgggattcatacagcggccagccatccgtcatccatatcaccacgtcaaagggtgacagcaggctcataagacgccccagcgtcgccatagtgcgttcaccgaatacgtgcgcaacaaccgtcttccggagactgtcatacgcgtaaaacagccagcgctggcgcgatttagccccgacatagccccactgttcgtccatttccgcgcagacgatgacgtcactgcccggctgtatgcgcgaggttaccgactgcggcctgagttttttaagtgacgtaaaatcgtgttgaggccaacgcccataatgcgggctgttgcccggcatccaacgccattcatggccatatcaatgattttctggtgcgtaccgggttgagaagcggtgtaagtgaactgcagttgccatgttttacggcagtgagagcagagatagcgctgatgtccggcggtgcttttgccgttacgcaccaccccgtcagtagctgaacaggagggacagctgatagaaacagaagccactggagcacctcaaaaacaccatcatacactaaatcagtaagttggcagcatcacctacctcaatgtgtatcacaatatccatattctttgtgggggagtctggagattgagtagatattcttgttcagaatgtatcagccgatggttctacgattcttaagccacgaagagttcagatagtacaacggcatgtctcttttgactatctggcaaccggcagtgtgttctctcacgcatcacaaaagcagcaggcataaaaaaacccgcttgcgcgggctttttcacaaagcttcagcaaattggcgattaagccagtttgttgatctgtgcagtcaggttagccttatgacgtgcagctttgtttttgtggatcagacctttagcagcctgacggtccacgatcggttgcatttcgttaaatgctttctgtgcagcagctttgtcgccagcttcgatagctgcgtatactttcttgatgaaagtacgcatcatagagcgacggcttgcgttgtgcttacgagccttttcagactgaatggcgcgcttcttagctgatttgatattagccaaggtccaactcccaaatgtgttctatatggacaattcaaaggccgaggaatatgcccttttagccttcttttgtcaatggatttgtgcaaataagcgccgttaatgtgccggcactcgttacgtagtgatggcgcaggattctaccagcttgcggggtgtgaatacagcttttccgcgataaaaattgcagcaggcggtcagtttcttcccgtgatttgcgccatggcaatgaaaagccacttctttctgatttcggtactcaatcgccggttaaccttgaccgctgtacaaggtatactcggacgattttcactgttttgagccagacatgaagctgatacgcggcatacataatctcagccaggccccgcaagaagggtgtgtgctgactattggtaatttcgacggcgtgcatcgcggtcatcgcgcgctgttacagggcttgcaggaagaagggcgcaagcgcaacttaccggtgatggtgatgctttttgaacctcaaccactggaactgtttgctaccgataaagccccggcaagactgacccggctgcgggaaaaactgcgttaccttgcagagtgtggcgttgattacgtgctgtgcgtgcgtttcgacaggcgtttcgcggcgttaaccgcgcaaaatttcatcagcgatcttctggtgaagcatttgcgcgtaaaatttcttgccgtaggtgatgatttccgctttggcgctggtcgtgaaggcgatttcttgttattacagaaagctggcatggaatacggcttcgatatcaccagtacgcaaactttttgcgaaggtggcgtgcgcatcagcagcaccgccgtgcgtcaggcccttgcggatgacaatctggctctggcagagagtttactggggcacccgtttgccatctccgggcgtgtagtccacggtgatgaattagggcgcactataggtttcccgacggcgaatgtaccgctgcgccgtcaggtttccccggtgaaaggggtttatgcggtagaagtgctgggcctcggtgaaaagccgttacccggcgtggcaaacatcggaacacgcccaacggttgccggtattcgccagcagctggaagtgcatttgttagatgttgcaatggacctttacggtcgccatatacaagtagtgctgcgtaaaaaaatacgcaatgagcagcgatttgcgtcgctggacgaactgaaagcgcagattgcgcgtgatgaattaaccgcccgcgaattttttgggctaacaaaaccggcttaagcctgttatgtaatcaaaccgaaatacggaaccgagaatctgatgagtgactataaatcaaccctgaatttgccggaaacagggttcccgatgcgtggcgatctcgccaagcgcgaacccggaatgctggcgcgttggactgatgatgatctgtacggcatcatccgtgcggctaaaaaaggcaaaaaaaccttcattctgcatgatggccctccttatgcgaatggcagcattcatattggtcactcggttaacaagattctgaaagacattatcgtgaagtccaaagggctttccggttatgactcgccgtatgtgcctggctgggactgccacggtctgccgatcgagctgaaagtcgagcaagaatacggtaagccgggtgagaaattcaccgccgccgagttccgcgccaagtgccgcgaatacgcggcgacccaggttgacggtcaacgcaaagactttatccgtctgggcgtgctgggcgactggtcgcacccgtacctgaccatggacttcaaaactgaagccaacatcatccgcgcgctgggcaaaatcatcggcaacggtcacctgcacaaaggcgcgaagccagttcactggtgcgttgactgccgttctgcgctggcggaagcggaagttgagtattacgacaaaacttctccgtccatcgacgttgctttccaggcagtcgatcaggatgcactgaaagcaaaatttgccgtaagcaacgttaacggcccaatctcgctggtaatctggaccaccacgccgtggactctgcctgccaaccgcgcaatctctattgcaccagatttcgactatgcgctggtgcagatcgacggtcaggccgtgattctggcgaaagatctggttgaaagcgtaatgcagcgtatcggcgtgaccgattacaccattctcggcacggtaaaaggtgcggagcttgagctgctgcgctttacccatccgtttatgggcttcgacgttccggcaatcctcggcgatcacgttaccctggatgccggtaccggtgccgttcacaccgcgcctggccacggcccggacgactatgtgatcggtcagaaatacggcctggaaaccgctaacccggttggcccggacggcacttatctgccgggcacttatccgacgctggatggcgtgaacgtcttcaaagcgaacgacatcgtcgttgcgctgctgcaggaaaaaggcgcgctgctgcacgttgagaaaatgcagcacagctatccgtgctgctggcgtcacaaaacgccgatcatcttccgcgcgacgccgcagtggttcgtcagcatggatcagaaaggtctgcgtgcgcagtcactgaaagagatcaaaggcgtgcagtggatcccggactggggccaggcgcgtatcgagtcgatggttgctaaccgtcctgactggtgtatctcccgtcagcgcacctggggtgtaccgatgtcactgttcgtgcacaaagacacggaagagctgcatccgcgtacccttgaactgatggaagaagtggcaaaacgcgttgaagtcgatggcatccaggcgtggtgggatctcgatgcgaaagagatcctcggcgacgaagctgatcagtacgtgaaagtgccggacacattggatgtatggtttgactccggatctacccactcttctgttgttgacgtgcgtccggaatttgccggtcacgcagcggacatgtatctggaaggttctgaccaacaccgcggctggttcatgtcttccctaatgatctccaccgcgatgaagggtaaagcgccgtatcgtcaggtactgacccacggctttaccgtggatggtcagggccgcaagatgtctaaatccatcggcaataccgtttcgccgcaggatgtgatgaacaaactgggcgcggatattctgcgtctgtgggtggcatcaaccgactacaccggtgaaatggccgtttctgacgagatcctgaaacgtgctgccgatagctatcgtcgtatccgtaacaccgcgcgcttcctgctggcaaacctgaacggttttgatccagcaaaagatatggtgaaaccggaagagatggtggtactggatcgctgggccgtaggttgtgcgaaagcggcacaggaagacatcctcaaggcgtacgaagcatacgatttccacgaagtggtacagcgtctgatgcgcttctgctccgttgagatgggttccttctacctcgacatcatcaaagaccgtcagtacaccgccaaagcggacagtgtggcgcgtcgtagctgccagactgcgctatatcacatcgcagaagcgctggtgcgctggatggcaccaatcctctccttcaccgctgatgaagtgtggggctacctgccgggcgaacgtgaaaaatacgtcttcaccggtgagtggtacgaaggcctgtttggcctggcagacagtgaagcgatgaacgatgcgttctgggacgagctgttgaaagtgcgtggcgaagtgaacaaagtcattgagcaagcgcgtgccgacaagaaagtgggtggctcgctggaagcggcagtaaccttgtatgcagaaccggaactgtcggcgaaactgaccgcgctgggcgatgaattacgatttgtcctgttgacctccggcgctaccgttgcagactataacgacgcacctgctgatgctcagcagagcgaagtactcaaagggctgaaagtcgcgttgagtaaagccgaaggtgagaagtgcccacgctgctggcactacacccaggatgtcggcaaggtggcggaacacgcagaaatctgcggccgctgtgtcagcaacgtcgccggtgacggtgaaaaacgtaagtttgcctgatgagtcaatcgatctgttcaacagggctacgctggctgtggctggtggtagtcgtgctgattatcgatctgggcagcaaatacctgatcctccagaactttgctctgggggatacggtcccgctgttcccgtcgcttaatctgcattatgcgcgtaactatggcgcggcgtttagtttccttgccgatagcggcggctggcagcgttggttctttgccggtattgcgattggtattagcgtgatcctggcagtgatgatgtatcgctcgaaggccacgcagaagctaaacaatatcgcttacgcgctgattattggcggcgcgctgggcaacctgttcgaccgcctgtggcacggcttcgttgtcgatatgatcgacttctacgtcggcgactggcacttcgccaccttcaaccttgccgatactgccatctgtgtcggtgcggcactgattgtgctggaaggttttttgccttctagagcgaaaaaacaataataaaccctgccggatgcgatgctgacgcatcttatccggcctacagattgctgcgaaatcgtaggccggataaggcgtttacgccgcatccggcaaaaatccttaaatataagagcaaacctgcatgtctgaatctgtacagagcaatagcgccgtcctggtgcacttcacgctaaaactcgacgatggcaccaccgccgagtctacccgcaacaacggtaaaccggcgctgttccgcctgggtgatgcttctctttctgaagggctggagcaacacctgttggggctgaaagtgggcgataaaaccaccttctcgttggagccagatgcggcgtttggcgtgccgtcaccggacctgattcagtacttctcccgccgtgaatttatggatgcaggcgagccagaaattggcgcaatcatgctttttaccgcaatggatggcagtgagatgcctggcgtgatccgcgaaattaacggcgactccattaccgttgatttcaaccatccgctggccgggcagaccgttcattttgatattgaagtgctggaaatcgatccggcactggaggcgtaacatgcagatcctgttggccaacccgcgtggtttttgtgccggggtagaccgcgctatcagcattgttgaaaacgcgctggccatttacggcgcaccgatatatgtccgtcacgaagtggtacataaccgctatgtggtcgatagcttgcgtgagcgtggggctatctttattgagcagattagcgaagtaccggacggcgcgatcctgattttctccgcacacggtgtttctcaggcggtacgtaacgaagcaaaaagtcgcgatttgacggtgtttgatgccacctgtccgctggtgaccaaagtgcatatggaagtcgcccgcgccagtcgccgtggcgaagaatctattctcatcggtcacgccgggcacccggaagtggaagggacaatgggccagtacagtaacccggaagggggaatgtatctggtcgaatcgccggacgatgtgtggaaactgacggtcaaaaacgaagagaagctctcctttatgacccagaccacgctgtcggtggatgacacgtctgatgtgatcgacgcgctgcgtaaacgcttcccgaaaattgtcggtccgcgcaaagatgacatctgctacgccacgactaaccgtcaggaagcggtacgcgccctggcagaacaggcggaagttgtgttggtggtcggttcgaaaaactcctccaactccaaccgtctggcggagctggcccagcgtatgggcaaacgcgcgtttttgattgacgatgcgaaagacatccaggaagagtgggtgaaagaggttaaatgcgtcggcgtgactgcgggcgcatcggctccggatattctggtgcagaatgtggtggcacgtttgcagcagctgggcggtggtgaagccattccgctggaaggccgtgaagaaaacattgttttcgaagtgccgaaagagctgcgtgtcgatattcgtgaagtcgattaagtcattagcagcctaagttatgcgaaaatgccggtcttgttaccggcattttttatggagaaaacatgcgtttacctatcttcctcgatactgaccccggcattgacgatgccgtcgccattgccgccgcgatttttgcacccgaactcgacctgcaactgatgaccaccgtcgcgggtaatgtctcggttgagaaaactacccgcaatgccctgcaactgctgcatttctggaatgcggagattccgctcgcccaaggggccgctgtgccactggtacgcgcaccgcgtgatgcggcatctgtgcacggcgaatcgggaatggctggctacgactttgttgagcacaaccgaaagccgctcgggataccggcgtttctggcgattcgggatgccctgatgcgtgcaccagagcctgttaccctggtggccatcggcccgttaaccaatattgcgctgttactttcacaatgcccggaatgcaagccgtatattcgccgtctggtgatcatgggtggttctgccggacgcggcaactgtacgccaaacgccgagtttaatattgctgccgatccagaagctgctgcctgtgtcttccgcagtggtattgaaatcgtcatgtgcggtttggatgtcaccaatcaggcaatattaactcctgactatctctctacactgccgcagttaaaccgtaccgggaaaatgcttcacgccctgtttagccactaccgtagcggcagtatgcaaagcggcttgcgaatgcacgatctctgcgccatcgcctggctggtgcgcccggacctgttcactctcaaaccctgttttgtggcagtggaaactcagggcgaatttacctcaggcacgacggtggttgatatcgacggttgcctgggcaagccagccaatgtacaggtggcattggatctggatgtgaaaggcttccagcagtgggtggctgaggtgctggctctggcgtcgtaacctgtcacatgttattggcatgcagtcattcatcgactcatgcctttcactgatatccctccctgtttatcattaatttctaattatcagcgtttttggctggcggcgtagcgatgcgctggttactctgaaaacggtctatgcaaattaacaaaagagaatagctatgcatgatgcaaacatccgcgttgccatcgcgggagccggggggcgtatgggccgccagttgattcaggcggcgctggcattagagggcgtgcagttgggcgctgcgctggagcgtgaaggatcttctttactgggcagcgacgccggtgagctggccggagccgggaaaacaggcgttaccgtgcaaagcagcctcgatgcggtaaaagatgattttgatgtgtttatcgattttacccgtccggaaggtacgctgaaccatctcgctttttgtcgccagcatggcaaagggatggtgatcggcactacggggtttgacgaagccggtaaacaagcaattcgtgacgccgctgccgatattgcgattgtctttgctgccaattttagcgttggcgttaacgtcatgcttaagctgctggagaaagcagccaaagtgatgggtgactacaccgatatcgaaattattgaagcacatcatagacataaagttgatgcgccgtcaggcaccgcactggcaatgggagaggcgatcgcccacgcccttgataaagatctgaaagattgcgcggtctacagtcgtgaaggccacaccggtgaacgtgtgcctggcaccattggttttgccaccgtgcgtgcaggtgacatcgttggtgaacataccgcgatgtttgccgatattggcgagcgtctggagatcacccataaggcgtccagccgtatgacatttgctaacggcgcggtaagatcggctttgtggttgagtggtaaggaaagcggtctttttgatatgcgagatgtacttgatctcaataatttgtaaccacaaaatatttgttatggtgcaaaaataacacatttaatttattgattataaagggctttaatttttggcccttttatttttggtgttatgtttttaaattgtctataagtgccaaaaattacatgttttgtcttctgtttttgttgttttaatgtaaattttgaccatttggtccacttttttctgctcgtttttatttcatgcaatcttcttgctgcgcaagcgttttccagaacaggttagatgatctttttgtcgcttaatgcctgtaaaacatgcatgagccacaaaataatataaaaaatcccgccattaagttgacttttagcgcccatatctccagaatgccgccgtttgccagaaattcgtcggtaagcagatttgcattgatttacgtcatcattgtgaattaatatgcaaataaagtgagtgaatattctctggagggtgttttgattaagtcagcgctattggttctggaagacggaacccagtttcacggtcgggccataggggcaacaggttcggcggttggggaagtcgttttcaatacttcaatgaccggttatcaagaaatcctcactgatccttcctattctcgtcaaatcgttactcttacttatccccatattggcaatgtcggcaccaatgacgccgatgaagaatcttctcaggtacatgcacaaggtctggtgattcgcgacctgccgctgattgccagcaacttccgtaataccgaagacctctcttcttacctgaaacgccataacatcgtggcgattgccgatatcgatacccgtaagctgacgcgtttactgcgcgagaaaggcgcacagaatggctgcattatcgcgggcgataacccggatgcggcgctggcgttagaaaaagcccgcgcgttcccaggtctgaatggcatggatctggcaaaagaagtgaccaccgcagaagcctatagctggacacaagggagctggacgttgaccggtggcctgccagaagcgaaaaaagaagacgagctgccgttccacgtcgtggcttatgattttggtgccaagcgcaacatcctgcggatgctggtggatagaggctgtcgcctgaccatcgttccggcgcaaacttctgcggaagatgtgctgaaaatgaatccagacggcatcttcctctccaacggtcctggcgacccggccccgtgcgattacgccattaccgccatccagaaattcctcgaaaccgatattccggtattcggcatctgtctcggtcatcagctgctggcgctggcgagcggtgcgaagactgtcaaaatgaaatttggtcaccacggcggcaaccatccggttaaagatgtggagaaaaacgtggtaatgatcaccgcccagaaccacggttttgcggtggacgaagcaacattacctgcaaacctgcgtgtcacgcataaatccctgttcgacggtacgttacagggcattcatcgcaccgataaaccggcattcagcttccaggggcaccctgaagccagccctggtccacacgacgccgcgccgttgttcgaccactttatcgagttaattgagcagtaccgtaaaaccgctaagtaatcaggagtaaaagagccatgccaaaacgtacagatataaaaagtatcctgattctgggtgcgggcccgattgttatcggtcaggcgtgtgagtttgactactctggcgcgcaagcgtgtaaagccctgcgtgaagagggttaccgcgtcattctggtgaactccaacccggcgaccatcatgaccgacccggaaatggctgatgcaacctacatcgagccgattcactgggaagttgtacgcaagattattgaaaaagagcgcccggacgcggtgctgccaacgatgggcggtcagacggcgctgaactgcgcgctggagctggaacgtcagggcgtgttggaagagttcggtgtcaccatgattggtgccactgccgatgcgattgataaagcagaagaccgccgtcgtttcgacgtagcgatgaagaaaattggtctggaaaccgcgcgttccggtatcgcacacacgatggaagaagcgctggcggttgccgctgacgtgggcttcccgtgcattattcgcccatcctttaccatgggcggtagcggcggcggtatcgcttataaccgtgaagagtttgaagaaatttgcgcccgcggtctggatctctctccgaccaaagagttgctgattgatgagtcgctgatcggctggaaagagtacgagatggaagtggtgcgtgataaaaacgacaactgcatcatcgtctgctctatcgaaaacttcgatgcgatgggcatccacaccggtgactccatcactgtcgcgccagcccaaacgctgaccgacaaagaatatcaaatcatgcgtaacgcctcgatggcggtgctgcgtgaaatcggcgttgaaaccggtggttccaacgttcagtttgcggtgaacccgaaaaacggtcgtctgattgttatcgaaatgaacccacgcgtgtcccgttcttcggcgctggcgtcgaaagcgaccggtttcccgattgctaaagtggcggcgaaactggcggtgggttacaccctcgacgaactgatgaacgacatcactggcggacgtactccggcctccttcgagccgtccatcgactatgtggttactaaaattcctcgcttcaacttcgaaaaattcgccggtgctaacgaccgtctgaccactcagatgaaatcggttggcgaagtgatggcgattggtcgcacgcagcaggaatccctgcaaaaagcgctgcgcggcctggaagtcggtgcgactggattcgacccgaaagtgagcctggatgacccggaagcgttaaccaaaatccgtcgcgaactgaaagacgcaggcgcagatcgtatctggtacatcgccgatgcgttccgtgcgggcctgtctgtggacggcgtcttcaacctgaccaacattgaccgctggttcctggtacagattgaagagctggtgcgtctggaagagaaagtggcggaagtgggcatcactggcctgaacgctgacttcctgcgccagctgaaacgcaaaggctttgccgatgcgcgcttggcaaaactggcgggcgtacgcgaagcggaaatccgtaagctgcgtgaccagtatgacctgcacccggtttataagcgcgtggatacctgtgcggcagagttcgccaccgacaccgcttacatgtactccacttatgaagaagagtgcgaagcgaatccgtctaccgaccgtgaaaaaatcatggtgcttggcggcggcccgaaccgtatcggtcagggtatcgaattcgactactgttgcgtacacgcctcgctggcgctgcgcgaagacggttacgaaaccattatggttaactgtaacccggaaaccgtctccaccgactacgacacttccgaccgcctctacttcgagccggtaactctggaagatgtgctggaaatcgtgcgtatcgagaagccgaaaggcgttatcgtccagtacggcggtcagaccccgctgaaactggcgcgcgcgctggaagctgctggcgtaccggttatcggcaccagcccggatgctatcgaccgtgcagaagaccgtgaacgcttccagcatgcggttgagcgtctgaaactgaaacaaccggcgaacgccaccgttaccgctattgaaatggcggtagagaaggcgaaagagattggctacccgctggtggtacgtccgtcttacgttctcggcggtcgggcgatggaaatcgtctatgacgaagctgacctgcgtcgctacttccagacggcggtcagcgtgtctaacgatgcgccagtgttgctggaccacttcctcgatgacgcggtagaagttgacgtggatgccatctgcgacggcgaaatggtgctgattggcggcatcatggagcatattgagcaggcgggcgtgcactccggtgactccgcatgttctctgccagcctacaccttaagtcaggaaattcaggatgtgatgcgccagcaggtgcagaaactggccttcgaattgcaggtgcgcggcctgatgaacgtgcagtttgcggtgaaaaacaacgaagtctacctgattgaagttaacccgcgtgcggcgcgtaccgttccgttcgtctccaaagccaccggcgtaccgctggcaaaagtggcggcgcgcgtgatggctggcaaatcgctggctgagcagggcgtaaccaaagaagttatcccgccgtactactcggtgaaagaagtggtgctgccgttcaataaattcccgggcgttgacccgctgttagggccagaaatgcgctctaccggggaagtcatgggcgtgggccgcaccttcgctgaagcgtttgccaaagcgcagctgggcagcaactccaccatgaagaaacacggtcgtgcgctgctttccgtgcgcgaaggcgataaagaacgcgtggtggacctggcggcaaaactgctgaaacagggcttcgagctggatgcgacccacggcacggcgattgtgctgggcgaagcaggtatcaacccgcgtctggtaaacaaggtgcatgaaggccgtccgcacattcaggaccgtatcaagaatggcgaatatacctacatcatcaacaccacctcaggccgtcgtgcgattgaagactcccgcgtgattcgtcgcagtgcgctgcaatataaagtgcattacgacaccaccctgaacggcggctttgccaccgcgatggcgctgaatgccgatgcgactgaaaaagtaatttcggtgcaggaaatgcacgcacagatcaaataatagcgtgtcatggcagatatttttcatccgctaatttgatcgaataactaatacggttctctgatgaggaccgtttttttttgcccattaagtaaatcttttggggaatcgatatttttgatgacataagcaggatttagctcacacttatcgacggtgaagttgcatactatcgatatatccacaattttaatatggccttgtttaattgcttcaaaacgagtcatagccagacttttaatttgtgaaactggagttcgtatgtgtgaaggatatgttgaaaaaccactctacttgttaatcgccgaatggatgatggctgaaaatcggtgggtgatagcaagagagatctctattcatttcgatattgaacacagcaaggcggttaataccctgacttatattctgtcggaagtcacagaaataagctgcgaagttaagatgatccctaataagctggaagggcggggatgccagtgtcagcgactggttaaagtggtcgatatcgatgagcaaatttacgcgcgcctgcgcaataacagtcgggaaaaattagtcggtgtaagaaagacgccgcgtattcctgccgttccgctcacggaacttaaccgcgagcagaagtggcagatgatgttgtcaaagagtatgcgtcgttaattttatctcgttgataccgggcgtcctgcttgccagatgcgatgttgtagcatcttatccagcaaccaggtcgcatccggcaagatcaccgtttaggcgtcacatccgtcgtcccctgcaaacgggggcgattttcctccatttgcctcagtggctgcgtttcatgtaacgatacatgacagcgcccgacaagatcctgatactctttggtattcaaccgtttccagtgtaactcgtcgtcactaacattgcgtacagcgcgggctggcgtacccatcaacaactggcgtttctcgccgcgaaagcccgctttgacaaagctcatggcggcaacaatgctctcttcgccaatgaccgcgccatccataatcacgctgttcatcccgaccaatgcatcgcgaccaatcaaacaaccatgcaggatcgctccgtgcccgatatggccgttttccccaacgatagtgtcagtgtcgcagtagccatgcataatgcagccatcctgaatattggctcccgcttgcacgatcaaccgcccgtagtcaccacgcagtgaggcgagtgggccgatgtagacaccggctcccacaatcacatcgccaatcaagacggcactgggatggacaaacgccgtcgggtgaaccaccggaattaacccctcaaaggcgtaatagctcacggttgttaacgtcctttccacaccggatcgcgcttctcggcaaacgccagcggcccttcaatggcatcttccgaatgcagaaccgatggatagtgtttcaacacgccgctgcgaatatagcgatacgcttcttctaccggcatttcgctggtggtgcggtagatctctttcagcgccgcaatcgccagcggggcgctgttaaccagctgctgagccagttcgcgggcgttatccatcagttccgcctggctaaccacgcggttgactatcccccaacgcagcgcctcttctgcgcccattcgtctgccggtcatcaccatttcattgacgatggcaggcggcaggatcttcggcagacgcagcacaccgccgctgtcaggaacgatgcccagtttggcttccggcagggcgaagctggcgttatcggcacaaacaataaaatctgccgccagcgccagttcaaagccgccgccaaaggcatagccgttcacagctgcgataaccggtttgtcgagattgaaaatttcggttaatcccgcaaaaccacccggaccaaagtcagcatccggtgcttcgccttctgctgccgcttttaaatcccagcccgcggaaaagaacttctctccggcaccggtaataatggcgacacgtaattgcggatcgtcacggaaatttagaaatacttcgcccatttcaaagctggtttttgcatcaatagcattcgcttttggacgatcaagggtaatttccagaattgatccattgcgggtcagatgtaatgattcactcattccttttctccatttttgctttttcagggacgacaacatccctgcaaaaaatgcatattgttttagagtgtgattattagctggcagggtagttccctgctgtttcatttatttcagattctttctaattattttccccgagcaattacgtggcagatcttttctgatctccagataagagggcactttaaatttcgccatattttgttcgcagaagcggaaaaattcctcttcgctcaatgtttcaccttcattcagcaccacaaatgctttgatggcttcatcgcgaatcgaatctttaatacccacaaccacgatgtcctgaattttcgggtgcgcggcgataatattttccagctccacgcaggagacattctcgccgccacgtttaatcatattgcagcggcgatcgacgaaataaaaaaagtcctcttcgtcgcggtatccggtatcgccggtatgcagccagccatcggcttccagcactttcgcagtggcttgtgggttgagaaagtactctttgaagatggttttcccaggtatgcctttaatgcagatttcaccgatctcaccagccgggagcgggcgattgtgatcgtcgcggatctccgcttcgtagcaaaaccccacccgaccaatcgacggccagcgtcgtttatcgccaggacgatcgccgataatgcccacaatggtttccgtcatcccataagacgtcagcaagcgaacgccgaagcgttcacaaaacgcatctttttcctgctccgacaagttgagataaaacatcacttcccgcaggcggtgttgctgatcgttcgctgaaggcggctgtaccatcaacgtacggatcatcatcggaatacattcggtaacggtggcgcggtacttctgtacctgtccccagaaggcgcgggcgctgtatttctcgaccagcacaaaggtggccccggcagaaaacgccgccatcgccgcagtacactggcaatcgatatgaaacgcaggcattaccgtcaggtagacgtcatcgtcacgcagtgcacactgccaggcggagtaatatccagcgaagcgcaggttgtaatgggtaatcaccacacctttcggtcgggaggtggtgccggaggtgaagagaatttccgccgtatcgtcagtcgatagcggcggtgcatagcacaaggtggcaggttgttgatttttcagttgagtaaacgaactcacgccatcatcagcgggaagtgccacatctgtcaggcaaatgtgccgcaattgagtggcatcttcctgctgaatctgttgatacataggatagaattgcgcactggtcaccagcaggcacgcctggctattttgcaggatccacgcgctttcctcgcacaacaggcgggcgttaatcggcaccataatcgcgccaatttttgccagcccgaaccagcaaaagataaattccgggcagttgtcgagatgtagtgcaaccttgtcgcctttgcgaatccccagcgtataaaacaggtttgccgtgcggttaatctcctgatttaactcaagataactataccggttaacgactccgccgctggattcacaaatcagcgccgttttatgaccgtaaacgtccgcaagatcgtcccacatttgacgtagatgttgtccgccaatgatatccattgcacctctatccatttttgttcgtttgttattgggcgggcgctagtcaggcaagccgactgacgccacgcgtttagtcctcaactttggccagacctttgctgaccaactcctgaatgtcgttttcgctgtagccgatatttttcaaaatggcagccgtgtccatgccatgtgagggcattccgcgccagatttgtccggggttatttttgaatttcggcatgatgttcggccctttgcaggtgcgaccatccatcgtttgccactgagtgattgattcgcgagccacatactgtggattgctttccagttccggtacggtcagcactttggcgcaggcgatattcagttcagcaaagcgttcttttacttccgcgatggtatgtgtcgccagccaggcatcgagtttctcttcaaccagtgggccgtaagggcattcgatacggtggataagctgagtgccttccgggatttctggcgtgccaagcagatgtgcgaggccaatatctttaaagcactcttcaatttgggtaatgcccaccagttccatcacgatgtagccgtcggcacatttatacagaccgcaaccggcgtagtagggatctttacctttgctcatgcgcgggcacatttcgccgccgttgaagtaatccatcatgaagtactggcccatacgcagcatcacttcatacatggcgatgtcgatactttcgcctttaccggtttcacgcactttatgcagtgctgccagcgccgccgtggtggcggtcaggccagaaaagtaatcggcggtatacgggaaggcaggcattggctggtcaacatcaccgttctgaatcaggtaaccactaaaggcctgggcgatagtgttataggccggaagattggtgtactcctcggtgccgtactgaccaaaaccggacaggtgagcgataaccagtttcgggttgtgctgccacagtacttcatcggtaatgccacgacgggcaaaggccggacctttactggcttcgatgaagatatcggtggtttccattaatttcagaaacgcttcgcggccttcatctttgaaaatatttaacgacagcgcgtgcaaattgcggcgggagagttgcgggtagttcggttgaacgcgaatggtgtcggcccaggcgacgttctcgatccagataacttccgcgccccattctgcgaacatttgcccggcaaacggtccggcgatttcgataccggagaagacaacgcgcaatccggccaacggcccgaatttcggcatgggtagatgatccattatttgctcctgaaaaatttatgtagcgcatgactgccggatgcggcgtaaacgctttatccggcctacattcgtgctcccgtaggcctgataagacgcatcagcgtcgcatcaggcagcgcacggacttagcggtattgcttcagcaccgcacgacccagcgtcaggatctgcatttcgtcagatcccccggagacgcggtctacacgcagatcacgccagaagcggctgatgcggtggttgcccgcaatcccgacaccgcccagcacctgcattgcgctatccacaacttcaaatgccgcattggcgcagaagtatttgcacatcgctgcatcgccagaggtgatggtgccgttgtctgctttccacgctgcttcatacagcatgtttttcatggagtttaatttgatcgccatgtgggcgaatttttcctgaatcaactggaaacgaccaatagcctcgccaaactgcacgcgctgattggcgtagcgcgccgcatcttcaaaggcgcacatcgccgtaccgtagttggtgagggctaccaggaaacgttcatggtcgaactcttctttgacgcggttaaagccgttaccttcccgaccgaacatgtctttctcgtccagttccacgtcgtcaaaggtgatttcacagcagctatccatacgcagaccgagcttttcaagtttggtcactttgatgcccggtttgctcatatcaacaaaccattcggtgtagacaggtttgtccggagaagccccgtcgcgcgccatcaccacgatgtacggggtgtaggcgctgctggtaataaaacacttactaccattaagataaatcttaccatttctacgggtataagtcgttttcaggctacccacgtcggagcccgcgcccggttcggtaatcgctgagttccacatctgcttaccggtgccgcggaaagccataattttgtcgatctgctcttgtgtgccttcgcgcaggaaggtgttgaacccgcccggcaactggtacagcacataggttggtgcccccagacgtcccagctccatccacacggcggcgagagtaacaaaccccgcgtccagaccaccgtgctcttcagggatcagcagactgtcgatacccatatccgccagtgctttgacaaaacgttccgggtagacgctgtcacggtcgcactcggcaaaataggcctcccagttttcgctggccatcagttcgcggataccggcgacaaacagttcctgctcatcatttaaattaaaatccatctttcaacctcttgatattttgggggttaattaatctttccagttctgtttcgcgtctttaataaaggagagcgtcaccataatgttgacgaagaacagcgggcatcctccggcgataatggcggtttgaatcggtttcaggccgccgagcgccagcagaacaataccgataatgccaaccagaattgaccaaccgatacgcaccagcagaggtggttcttcaccatcgcgtacttcgcggcaagtggacatcgccagggtataagagcaggcgttaaccagcgtaacggtggcaataaagcagaggatgaagaagccccacatggtggcggtgctgagtggcagagcggcccaggtttcaatgatggcgcgcgccacaccgtactgttcgatcagatttggaatgttgatgatgtttttatctatcaacagcagagtgttactaccgagtacagtccacaggatccaggttgacgctgtcagccccagcaccatgccgaagcacagttcacgcacagtacgaccacgggagatgcgggcgaggaagatactcatctggatagcataaatcacccaccatgcccagtagaacacggtccagccctgcgggaagccgcctttagcgatgggatcggtatagaacaacatgcgcggcagatacatcagcaacatccccaccgaatcggtgaagtagttcatgatgaagctggcaccgctgacaatgaacacccaacccagcatcaggaagctcaggtaactacgcacgtcactggcgatacgtacccctttttgcagaccgcaagcgacgcaaatggcgttgaggataatccagcaggtaatgatgatagcgtccagttgcagggtatgcggaatgccaaacaaccattgcatacactcggtcaccagcggcgtggcaaggcccagactggtacccatcgcgaagatcaaggcgacgagatagaagttgtcgacgatagtgccgaacaaccctttggcgtgtttttcacctaccagcggcaccagtgtcgagctggggcgaatcacttccattttgcggacaaagaagaagtaagcgaaggcgactgaaaggaagctgtaagtggcccacggcagaggtccccagtggaacaagctgtaagccagccccaactctttcgcccctgtcgagttcggttctaagccaaacggcggggtggagatgtagtagtagatctcaatcgatccccagaacagtacggcagcagacgtacaggaggcgaacatcataaagatccaactggcggtgctaaattctggcggttcgttacctaaacgctttttggcatacgggccaaacaccagccagaaccaaccgaaaagcatcaccaccatataccattcaaatgcccatccccatacattggtgacgtaactgaatacagcattaataacgacattcgctgcatccagatctctgactgtaagccaacaaagtatgccgacgattattaacggcggaaagaaaaccttcggttctattcccgtttttctcttttcattcttcatgagttaattccactgtgaaaacgaatatttattttgcgttcccgtttgttttatttttgttaacatttaatataattattattaacctcgtggacgcgttaatggctaactcataatgggtattcaataagctgtattctgtgattggtatcacatttttgtttcgggtgaatagagggcgttttttcgttaattttgattaataatcagtttgttatgctctgttgtgagtaaaaaataacatctgactttcaatattggtgatccataaaacaatattgaaaatttctttttgctacgccgtgttttcaatattggtgaggaacttaacaatattgaaagttggatttatctgcgtgtgacattttcaatattggtgattaaagttttatttcaaaattaaagggcgtgatatctgtaattaacaccaccgatatgaacgacgtttccttcatgatttctggagatgcaatgaagattattacttgctataagtgcgtgcctgatgaacaggatattgcggtcaataatgctgatggttcattagacttcagcaaagccgatgccaaaataagccaatacgatctcaacgctattgaagcggcttgccagctaaagcaacaggcagcagaggcgcaggtgacagccttaagtgtgggcggtaaagccctgaccaacgccaaagggcgtaaagatgtgctatcgcgcggcccggatgaactgattgtggtgattgatgaccagttcgagcaggcactgccgcaacaaacggcgagcgcactggctgcagccgcccagaaagcaggctttgatctgatcctctgtggcgatggttcttccgacctttatgcccagcaggttggtctgctggtgggcgaaatcctcaatattccggcagttaacggcgtcagcaaaattatctccctgacggcagataccctcaccgttgagcgcgaactggaagatgaaaccgaaaccttaagcattccgctgcctgcggttgttgctgtttccactgatatcaactccccacaaattccttcgatgaaagccattctcggcgcggcgaaaaagcccgtccaggtatggtcggcggcggatattggttttaacgcagaggcagcctggtcagaacaacaggttgccgcgccgaaacagcgcgaacgtcagcgcatcgtgattgaaggcgacggcgaagaacagatcgccgcatttgctgaaaatcttcgcaaagtcatttaattacaggggatgctatgaacacgttttctcaagtctgggtattcagcgataccccttctcgtctgccggaactgatgaacggtgcgcaggctttagctaatcaaatcaacacctttgtcctcaatgatgccgacggcgcacaggcaatccagctcggcgctaatcatgtctggaaattaaacggcaaaccggacgatcggatgatcgaagattacgccggtgtcatggctgacactattcgccagcacggcgcagacggcctggtgctgctgccaaacacccgtcgcggcaaattactggcggcaaaactgggttatcgccttaaagcggcggtgtctaacgatgccagcaccgtcagcgtacaggacggtaaagcgacagtgaaacacatggtttacggtggtctggcgattggcgaagaacgcattgccacgccgtatgcggtactgaccatcagcagcggcacgttcgatgcggctcagccagacgcgtcacgcactggcgaaacgcacaccgtggagtggcaggctccggctgtggcgattacccgcacggcaacccaggcgcgccagagcaacagcgtcgatctcgacaaagcccgtctggtggtcagcgtcggtcgcggtattggcagcaaagagaacattgcgctggcagaacagctttgcaaggcgataggtgcggagttggcctgttctcgtccggtggcggaaaacgaaaaatggatggagcacgaacgctatgtcggtatctccaacctgatgctgaaacctgaactgtacctggcggtggggatctccgggcagatccagcacatggttggcgctaacgcgtcgcaaaccattttcgccatcaataaagataaaaatgcgccgatcttccagtacgcggattacggcattgttggcgacgccgtgaagatccttccggcgctgaccgcagctttagcgcgttgatccactctggcagggctgcattttggccctgccgctgacagggagctcttatgtccgaagatatctttgacgccatcatcgtcggtgcagggcttgccggttcggttgccgcactggtgctcgcccgcgaaggtgcgcaagtgttagttatcgagcgtggcaattccgcaggtgccaagaacgtcaccggcgggcgtctctatgcccacagtctggaacacattattcctggtttcgccgactccgcccccgtagaacgcctgatcacccatgaaaaactcgcgtttatgacggaaaagtcagcgatgactatggactactgcaatggtgacgaaacctcgccatcccagcgttcttactccgttttgcgcagtaaatttgatgcctggctgatggagcaggccgaagaagcgggcgcgcagttaattaccgggatccgcgtcgataacctcgtacagcgcgatggcaaagtcgtcggtgtagaagccgatggcgatgtgattgaagcgaaaacggtgatccttgctgatggggtgaactccatccttgccgaaaaattggggatggcaaaacgcgtcaaaccgacggatgtggcggttggcgtgaaggaactgatcgagttaccgaagtcggttattgaagaccgttttcagttgcagggtaatcagggggcggcttgcctgtttgcgggatcacccaccgatggcctgatgggcggcggcttcctttataccaatgaaaacaccctgtcgctggggctggtttgtggtttgcatcatctgcatgacgcgaaaaaatcggtgccgcaaatgctggaagatttcaaacagcatccggccgttgcaccgctgatcgcgggcggcaagctggtggaatattccgctcacgtagtgccggaagcaggcatcaacatgctgccggagttggttggtgacggcgtattgattgccggtgatgccgccggaatgtgtatgaacctcggttttaccattcgcggtatggatctggcgattgccgccggggaagccgcagcaaaaaccgtgctttcagcgatgaaaagcgacgatttcagtaagcaaaaactggcggaatatcgtcagcatcttgagagtggtccgctgcgcgatatgcgtatgtaccagaaactaccggcgttccttgataacccacgcatgtttagcggctacccggagctggcggtgggtgtggcgcgtgacctgttcaccattgatggcagcgcgccggaactgatgcgcaagaaaatcctccgccacggcaagaaagtgggcttcatcaatctaatcaaggatggcatgaaaggagtgaccgttttatgacttctcccgtcaatgtggacgtcaaactgggcgtcaataaattcaatgtcgatgaagagcatccgcacattgttgtgaaggccgatgctgataaacaggcgctggagctgctggtgaaagcgtgccccgcaggtctgtacaagaagcaggatgacggcagtgtgcgcttcgattacgccggatgtctggagtgcggcacctgtcgcattctggggctggggtcggcgctggaacagtgggaatacccgcgcggcacctttggtgtggagttccgttacggctgatgttggtttgatacgtaacgccgcactgactctcattgcaaaaaacaggaataaccatgcaaccgtccagaaactttgacgatctcaaattctcctctattcaccgccgcattttgctgtggggaagcggtggtccgtttctggatggttatgtactggtaatgattggcgtggcgctggagcaactgacgccggcgctgaaactggacgctgactggattggcttgctgggcgcgggaacgctcgccgggctgttcgttggcacatcgctgtttggttatatttccgataaagtcggacggcgcaaaatgttcctcattgatatcatcgccatcggcgtgatatcggtggcgacgatgtttgtttcatcccccgtcgaactgttggtgatgcgggtacttatcggcattgtcatcggtgcagattatcccatcgccacctcaatgatcaccgagttctccagtacccgtcagcgggcgttttccatcagctttattgccgcgatgtggtatgtcggcgcgacctgtgccgatctggtcggctactggctttatgatgtggaaggcggctggcgctggatgctgggtagcgcggcgatcccctgtttgttgattttgattggtcgattcgaactgcctgaatctccccgctggttattacgcaaagggcgagtaaaagagtgcgaagagatgatgatcaaactgtttggcgaaccggtggctttcgatgaagagcagccgcagcaaacccgttttcgcgatctgtttaatcgccgccattttccttttgttctgtttgttgccgccatctggacctgccaggtgatcccaatgttcgccatttacacctttggcccgcaaatcgttggtttgttgggattgggggttggcaaaaacgcggcactagggaatgtggtgattagcctgttctttatgctcggctgtattccgccgatgctgtggttaaacactgccggacggcgtccattgttgattggcagctttgccatgatgacgctggcgctggcggttttggggctaatcccggatatggggatctggctggtagtgatggcctttgcggtgtatgcctttttctctggcgggccgggtaatttgcagtggctctatcctaatgaactcttcccgacagatatccgcgcctctgccgtgggcgtgattatgtccttaagtcgtattggcaccattgtttcgacctgggcactaccgatctttatcaataattacggtatcagtaacacgatgctaatgggggcgggtatctcgctgtttggcttgttgatttccgtagcgtttgccccggagactcgagggatgtcactggcgcagaccagcaatatgacgatccgcgggcagagaatggggtaaattgttcagatttctctcttttctgaatcaatattattgactataagccgcgtgaatatatgactacactttgtgggaaaacaaaggcgtaatcacgcgggctacctatgattcttataatttatgcgcatccgtatccgcatcattcccatgcgaataaacggatgcttgaacaggcaaggacgctggaaggcgtcgaaattcgctctctttatcaactctatcctgacttcaatatcgatattgccgccgagcaggaggcgctgtctcgcgccgatctgatcgtctggcagcatccgatgcagtggtacagcattcctccgctcctcaaactttggatcgataaagttttctcccacggctgggcttacggtcatggcggcacggcgctgcatggcaaacatttgctgtgggcggtgacgaccggcggcggggaaagccattttgaaattggtgcgcatccgggctttgatgtgctgtcgcagccgctacaggcgacggcaatctactgcgggctgaactggctgccaccgtttgccatgcactgcacctttatttgtgacgacgaaaccctcgaagggcaggcgcgtcactataagcaacgtctgctggaatggcaggaggcccatcatggatagccatacgctgattcaggcgctgatttatctcggttcggcagcgctgattgtacccattgcggtacgtcttggtctgggatcggtacttggctacctgatcgccggctgcattattggcccgtgggggctgcgactggtgaccgatgccgaatctattctgcactttgccgagattggggtggtgctgatgctgtttattatcggcctcgaactcgatccacaaaggctgtggaagctgcgtgcggcagtgttcggctgtggcgcattgcagatggtgatttgcggcggcctgctggggctgttctgcatgttacttgggctgcgctggcaggtcgcggaattgatcggcatgacgctggcgctctcctctacggcgattgccatgcaggcgatgaatgaacgcaatctgatggtgacgcaaatgggtcgcagtgcctttgcggtgctgctgttccaggatatcgcggcgatcccgctggtggcgatgattccgctactggcaacgagcagtgcctcgacgacgatgggcgcatttgctctctcggcgttaaaagtggcgggtgcgctggtgctggtggtattgctggggcgctatgtcacgcgtccggcgctgcgttttgtagcccgctctggcttgcgggaagtgtttagtgccgtggcgttattcctcgtgtttggctttggtttgctgctggaagaggtcggcttgtcgatggcgatgggcgcgtttctggcgggcgtactgctggcaagctcggaataccgtcatgcgctggagagcgatatcgaaccatttaaaggtttgctgttggggctgtttttcatcggtgttggcatgtcgatagactttggcacgctgcttgaaaacccattgcgcattgtcattttgctgctcggtttcctcatcatcaaaatcgccatgctgtggctgattgcccgaccgttgcaagtgccaaataaacagcgtcgttggtttgcggtgttgttagggcagggcagtgagtttgcctttgtggtatttggcgcggcgcagatggcgaatgtgctggagccggagtgggcgaaatcgctgaccctggcggtggcgctgtcgatggcagcaacgccgattctgctggtgatcctcaatcgccttgagcaatcttctactgaggaagcgcgtgaagccgatgagatcgacgaagaacagccgcgcgtgattatcgccggattcggtcgttttgggcagattaccggacgtttactgctctccagcggggtgaaaatggtggtactcgatcacgatccggaccatatcgaaaccttgcgtaaatttggtatgaaagtgttttatggcgatgccacgcggatggatttactggaatctgccggagcggcgaaagcggaagtgctgattaacgccatcgacgatccgcaaaccaacctgcaactgacagagatggtgaaagaacatttcccgcatttgcagattattgcccgcgcccgcgatgtcgaccactacattcgtttgcgtcaggcaggcgttgaaaagccggagcgtgaaaccttcgaaggtgcgctgaaaaccgggcgtctggcactggaaagtttaggtctggggccgtatgaagcgcgagaacgtgccgatgtgttccgccgctttaatattcagatggtggaagagatggcaatggttgagaacgacaccaaagcccgcgcggcggtctataaacgcaccagcgcgatgttaagtgagatcattaccgaggaccgcgaacatctgtcattaattcaacgacatggctggcagggaaccgaagaaggtaaacataccggcaacatggcggatgaaccggaaacgaaaccctcatcctaataaagagtgacgtaaatcacactttacagctaactgtttgtttttgtttcattgtaatgcggcgagtccagggagagagcgtggactcgccagcagaatataaaattttcctcaacatcatcctcgcaccagtcgacgacggtttacgctttacgtatagtggcgacaattttttttatcgggaaatctcaatgatcagtctgattgcggcgttagcggtagatcgcgttatcggcatggaaaacgccatgccgtggaacctgcctgccgatctcgcctggtttaaacgcaacaccttaaataaacccgtgattatgggccgccatacctgggaatcaatcggtcgtccgttgccaggacgcaaaaatattatcctcagcagtcaaccgggtacggacgatcgcgtaacgtgggtgaagtcggtggatgaagccatcgcggcgtgtggtgacgtaccagaaatcatggtgattggcggcggtcgcgtttatgaacagttcttgccaaaagcgcaaaaactgtatctgacgcatatcgacgcagaagtggaaggcgacacccatttcccggattacgagccggatgactgggaatcggtattcagcgaattccacgatgctgatgcgcagaactctcacagctattgctttgagattctggagcggcggtaattttgtatagaatttacggctagcgccggatgcgacgccggtcgcgtcttatccggccttcctatatcaggctgtgtttaagacgccgccgcttcgcccaaatccttatgccggttcgacggctggacaaaatactgtttatcttcccagcgcaggcaggttaatgtaccaccccagcagcagccggtatccagcgcgtatataccttccggcgtacctttgccctccagcgatgcccagtgaccaaaggcgatgctgtattcttcagcgacagggccaggaatcgcaaaccacggtttcagtggggcaggggcctcttccggcgattctttgctgtacatatccagttgaccgttcgggaagcaaaaacgcatacgggtaaaagcgttggtgataaaacgcagtcttcccagcccccgcaattccggtgaccagttatttggcatatcgccgtacatggcatcaagaaagaagggataggagtcactcgatagcaccgcttctacatcgcgtgcgcactctttggcggtctgcagatcccactgcggcgtgatccctgcgtgggccatcaccagctttttctcttcgtcgatttgcagcagaggctggcgccgcagccagttaagcagctcgtcggcatccggcgcttccagcagcggtgtcaggcgatctttcggtttattgcggctgatcccggcaaataccgccagcagatgcagatcgtgattgcccagcaccagacgtacgctgtcgcctaaggatttcacatagcgcagaacatccagcgaacccggcccgcgcgcgaccagatcgcccgtcagccagagggtatctttcccaggggtaaattctactttatgcagcaatgcgatcagttcatcgtaacaaccatgaacgtcgccaataaggtatgtcgccatattcttttaatgaatgagtgtgggaacggcgagtcggaatacgggaatgtcgatgctgaaagggacgccattttcatcgatcatttcgtagtgaccctgcatggtgcccagcggggtttcaatgattgcaccgctggtgtactggtactcttcgccaggcgcgataagtggctggacgccaaccactccttcgccctggacttcggtttcacggccattgccattggtgatcagccagtaacgccccaacaactgcactggcgctcgccccagattgcgtatggttacggtataagcaaaaacgtaacgttcattatcaggtgaagattgagcctcaatgtagacgctttgaacctgaatacacactcggggcgaattgatcatcgttaactctcctgcaaaggcgcgttctccgccagatagttcgccatctggcaatattgcgcgacagagatattttccgctcgcatcgccgggtcgatccccattcccgttaacacctcgacgctaaacaggttgccgaggctgttacgaatggttttacgacgctggttaaaggcttcggtggtgatgcggctcaacacacgaacatctttaaccgggtgaggcatcgttgcatgaggaaccaggcgcacgacggcggaatccactttgggtggtggtgtaaaggctgacggcggtacttccagtaccgggatcacattgcaatagtattgcgccatgacgcttaatcgaccatacgctttgctgttcggtcctgcaaccagacgattcaccacctctttttgcaacataaagtgcatgtcggcaatggcatcagtatagctaaacagatggaacatcaacggcgtggagatgttataaggcaggttgccgaaaacacgcagcggctgacccattttctcggccagttcaccaaagttaaaggtcatcgcatcctgctgataaatcgtcagtttcgggcctaagaatggatgcgtttgcagacgtgccgccagatcgcggtcaagttcgatgaccgtcagctggtccagacgttcgccgaccggttcggtcaatgccgccagaccggggccgatttcgaccatcgcctggcccttttgcgggttaatggcagacacaatactgtcgatcacgaactgatcgttgagaaagttttgcccgaagcgtttacgggctaagtggccctggtggactcgattattcattgggtgttaacaatcattttgatggcgagattaagcgccgtaataaaactgccgacatcggctttgccacgtcccgccagttcaagcgcggtgccgtggtccactgatgtgcgaataaagggcaggcccagcgtaatgttcacaccgcgcccgaagccctggtattttagcacgggaagaccctgatcgtggtacatcgccagcacggcgtcggcgttatcaagatatttcggctgaaacagggtatcggcaggcagcggcccgttgagtttcatcccctgcgcccgcagctcattgagcaccggaataatggtgtctatctcttccgtacccatatgaccgccttcgcccgcgtgcggattcagcccgcagaccagaatgcgcggttcggcaataccaaatttggtccgcaaatcgtgatgcaaaatagcaatcacttcgtgcaaaagtgcaggggtgatagcgtctgcgatatcgcgcagcggtaaatgcgtcgttgccagcgccacgcgaagttcttcggtcgccagcatcatcaccacctttttcgcctgcgaacgctcttcgaaaaactcggtatgaccggtaaaaggaatgccagcgtcgttaataacgcctttatgcaccggacctgtgatcagcgcggcaaattcgccgttcagacaaccatcgcacgctcgcgccagcgtttccaccacataatgcccattttcaaccgctaactgccccgcagtgacaggtgcacgtagcgcgacaggaagtagcgttaatgtgcccgcagtttgcggttgtgcaggggagttgggggaataagggcggagggtgagcggcaaaccgagcatcgctgcccggttggtaaggagagtggcatcggcacaaacaaccagttcgaccggccactcacgctgtgcaagctggacaactaagtccgggccaatcccggcgggctcgccgggagtgatcacaacacgttgggttttaaccattagttgctcaggattttaacgtaggcgctggcacgttgttcctgcatccagcttgctgcttcttccgagaacttacggttcatcagcatgcggtatgcacgatctttctgcgcagcgtcggttttatcgacattacgggtatccagcagttcgattaaatgccagccgaatgaagagtgaaccggtgcactcatttgacctttgttcaggcgagtcagggcgtcacggaaggccggatcgaaaatatctggtgtagcccagccgagatcgccgccctggttagcagagcctggatcctgagagaactctttcgctgcggcagcaaaagtcgttttaccactcttgatatcagcagcaatctgttccagtttcacacgggcctgttcgtcagtcatgatcggcgacggtttcagcagaatatggcgagcatgaacttcggtcaccgagatatttttgctttcgccgcgcaggtcgttaactttcagaatatggaagccaacgccggaacgaatcgggccaacaatgtcgcctttcttcgcggtgcttaatgcctgggcgaagatcccgggcaactcctgaatacggccccagcccatctggccgccgttcagcgcctgctggtcggcagaatgagcaatcgccagcttaccgaaatcagcgccgttacgcgcctgatcgacaatggcgcgcgcctggctttccgcttcgttcacctgatcagaggtcgggttttccggcagcgggatcaggatgtggctcaggttcagctcagtgctggcgtcgttttggttacccacctgctgcgccagggattcgacttcctgcggcaggatggtgatgcgacgacgcacctcgttgttacgcacttcagagataatcatctctttgcggatctggttacgataggtgttgtagttcagtccatcgtaagccagacggctgcgcatctgatccagcgtcatgttgttctgtttcgcgatgttagcaatcgcctgatccagctgctcatcggagattttcactcccattttctgccccatctgcaggatgatttgatccatgatcaaacgttccatgatttggtggcgcagcgtcgcgtcatcaggaagttgctgccttgcctgagcagcgttcagttttaccgactgcattaatccatcaacgtcgctttccagcacgacgccgttattgacgacggctgcgactttatcgactacctggggggcagcgaaactggtattcgcgatcatggcgataccgagaagcagcgttttccagttcttcatactttttccatttcaattaaccgcactgcggattacgtggtaaatcaacaaatcacaaagtgttttgatacggcagaatgttcgaacgcagcatctcttgcgtacccagaccgtagttggagctcaggccgcgaagttcgatgttaaagccgattgcgttgtcatataccgcatgttgtttatcgttatcccaaccgttcagcttccgctcgtaaccgacgcgaattgcatagcagcaggagctgtattgcacacctaacatagagtcggcttgcttgttagcattggtgtcgtagtagtaggccccaacaatggaccaacgatcggcaattggccagctggcgacagcacctacctgcgaaataccattcttatattgctcagcagtggaatagtacttaggcagcgtagcctgaatatattccgggctggcgtaacggtaattcagctgtaccagacggtcttcatcccgacggtattcaatgctggagttactggtcgctacgttatccagacgtgtatcgtactgaatcccgccacgcaatccccaacgctcggagatacgccagtaagtatcgcctgcccacaccagtgaacccgttttgtcgtcattctcccatgttatgttgtcatcgccagtgcgagactccgtgaaatagtagatttgaccaacggaaatattaaaacgttcaacggcagcatcatcatatatgcgagatgtgacaccggtcgtcacctggttagcggaggcaatacggtcaagaccgccgtaagtccggtcccggaacaggccagagtagtcagattgcagcagagacgagtcgtagttatagatgtcgctctgatcgcgatacggcacgtacaaatactgcgcgcgcggttccagcgtttgggtataacccggagccagcatttccatatcgcgttcaaagaccattttgccgtcaactttgaattgcggcattacgcggttaacggattcgtccagcttggtcgtgtttctggagttataccagtcaagattggtttgctgataatgggttgccagcaacttcgcttcggtattgatgctgccccagttattagagagcggcaaattgatggtcggttccaggtgaacacgggttgcttcaggcatgtcgtctctggtgttaacaaagtgcactgcctggccgtaaatacgcgtatcaaacggaccaacatcattctggtagtaattaacgtctaactgcggctctgccgagtagctactggtgttctgttcgctgaaaacctggaactgcttggttgaaacggtggcattgaagttttgcaccgcatagccaacgctgaatttttgcgttgcgtagccgtcagtactggaaccgtacttgttatcgaaatcattgaagtagctaggatcgctgaccttggtgtagtcgacgttgaaacgccacacctgatccatgaccccggagtggttccagtagaataaccaacgacgtgaactgtcatcgttcgggtgttcatcttcatagactttatctgaaggcagatagtccagttccatcaagccagcgcccgcctgggagaggtagcggaattcgttctcccacatgatgttgccacgacgatgcatataatgcggcgtgatggtggcatccatatttggcgcgatgttccagtaatatggcaggtagaactcaaagtagttggtggtggtgtacttggcgttcgggatcaagaaaccagagcgacgtttgtcacccaccggcaactgcaaataggggctataaaagatcggtaccggacccaccttaaagcgggcgttccagatctccgcaacttgttcttcgcggtcatgaataatttcgctacctaccacgctccaggtgtcagaacccggcagacaggaggtaaagctaccgttatccagaatggtatagcggttttcgccacgttgtttcatcaggtccgctttaccgcgaccctggcgacccaccatctggtaatcaccttcccagacgttggtatctttggtgttcagattcgcccagcctttcggccctttgaggatcacctggttatcgtcgtaatggacattaccgagcgcatcaacggtacgtaccggctccggttgtcctggtgcctctttttgatggagctgcacttcgtcggcctgcagacggctgttaccctgcatgatatccacgctgccagtaaacacggcgtcatccgggtagtcccctttcgcgtggtcagcattgatagtcacgggtaagtcattggtatcgccctgtaccagaggacggtcatagcttggcacgcccaacatgcactgtgaggcgaggtcggctgccagtccctgttgactataaagggcggtggcaatcatggtggccaggagagtggggatacgttttttcatacgttgattttattgttccatcatcggtaacgttgcgcgtgacaaacggtcagagactaacgtactcgtcatctctacgctagtgttaatcctgtccgaatagcgtcagtggtgttaggcacggcattgaatgacaggtatgataatgcaaattataggcgatgtcccacaattgaccgcagccggaaaacggtaaaagcacctttatattgtgggagatagccctgatatccgtgtgtcgatttggggaatatatgcagtattggggaaaaatcattggcgtggccgtggccttactgatgggcggcggcttttggggcgtagtgttaggcctgttaattggccatatgtttgataaagcccgtagccgtaaaatggcgtggttcgccaaccagcgtgagcgtcaggcgctgttttttgccaccacttttgaagtgatggggcatttaaccaaatccaaaggtcgcgtcacggaggctgatattcatatcgccagccagttgatggaccgaatgaatcttcatggcgcttcccgtactgcggcgcaaaatgcgttccgggtgggaaaatcagacaattacccgctgcgcgaaaagatgcgccagtttcgcagtgtctgctttggtcgttttgacttaattcgtatgtttctggagatccagattcaggcggcgtttgctgatggttcactgcacccgaatgaacgggcggtgctgtatgtcattgcagaagaattagggatctcccgcgctcagtttgaccagtttttgcgcatgatgcagggcggtgcacagtttggcggcggttatcagcagcaaactggcggtggtaactggcagcaagcgcagcgtggcccaacgctggaagatgcctgtaatgtgctgggcgtgaagccgacggatgatgcgaccaccatcaaacgtgcctaccgtaagctgatgagtgaacaccatcccgataagctggtggcgaaaggtttgccgcctgagatgatggagatggcgaagcagaaagcgcaggaaattcagcaggcatatgagctgataaagcagcagaaagggtttaaatgaccctgtaaatgatgctgagtaactgcccacgattaaaggtggccgccctggcggtcacttctttgagaaaaggcgtttactcagaatggtggacaggctcaatgcacggtttacgggaggggttctgtaggttttatcgcgttgaccctgcttaaggttgagagctttacgacgagcggaattatatttttacgtcttaaaaataaaaaacacatacctgaatgagcgatttttgaaagtatatttattcagaacgcgcatcatgagtttttaactcaatgcgaggctattaccatgaaagtatcagttccaggcatgccggttacacttttaaatatgagcaagaacgatatttataagatggtgagcggggacaagatggacgtgaagatgaatatctttcaacgcttgtgggagacgttacgccatctgttctggtcagataaacagactgaggcttataaacttctgttcaatttcgtgaataaccagactggcaacatcaacgcctcagaatactttactggggctatcaacgagaatgagagagaaaagtttatcaatagcctggaattattcaataaacttaaaacatgcgcaaaaaatccggatgagttggtcgcaaagggcaatatgcgctgggtcgcccagaccttcggggatatcgagttaagtgtcacttttttcattgaaaagaataagatatgtactcagacgttgcagctgcataagggccaaggtaacttgggcgttgatcttagaaaggcttaccttcccggcgttgacatgagggattgttaccttggtaaaaaaacaatgaaaggtagcaatgatatcctttatgagagacctgggtggaatgctaacctgggcgtgctaccccggacggtgctaccccggacggtgctaacccggacggtgctaacctggacggtgctaccgtgaacggtgctacctccttatatgatgaggtaattattattaataaaatcccccccaaaaaaattgatactaaaggagttgctactgaagaagttgctactaaaaaagtactgctgaacaaattactgacaacgcaattattgaatgagccagaataagctaaggttgaaggggctggaacgccccttcaaccttagcagtagcgtgggatgatttcacaattagaaagacctgcatgatgagctagagaagaggctagtgacgcaaggcgtcgtgcaggacacggatcaccgagatgggcatcgccaaccagactgctaattagcccatgaataacaatcagaaaggaccataacagacccgttaaaatgaaatataagagacggtcaacgggtgaagaaaaagttcaaaaattcgctgtggagcaggaagggaattaccgaatggaaagcgtagccacacgcaacaactgaaagcagtttggcagaaacaaaaaatccccggactcggggatttatgtacaagaggcagcccttaggatgagggtataaacgtacaggaaaggttaaaaatccgctggcgctttaaacgtcatactattgccatacgccggatgggtaatcgtcaacatctctgcatgtagcaacaaacgtggtgccatcgctctcgcttctggtgatgcataaaaacgatcgccgagaatcggatgacccagcgccagcatatgcacacgcaattgatgcgaacgcccggtaatcggttttaacaccactcttgccgtgttatccgccgcatactccaccacttcatattccgtctgcgcaggtttacccgtttcgtaacagactttctgtttcgggcggtttggccagtcgcaaatcagcggcagatccaccagaccttctgcgggggatggatgcccccagacgcgggccacatactgctttttcggctcgcgctcgcggaactggcgttttaactcccgctccgcggctttggtcagcgccactacaatcacgccgctggtagccatatccagacgatgcaccgattctgcctgcggataatcacgctgaatgcgcgtcatcacgctgtctttgtgctcttccagacgacccggcactgacaacaaaccgctcggcttgttgaccaccataatatggtcatcctgatacaggataaccaaccagggttcctgcggtggattgtagttttccatccccattttcggctccgttactgatgcgttacaacgatcaaacgcagggcatccagacgccaacctgcctgatccaggctttccattacctgctgacggttgctctcaatggcggtcagttcgtcgtcacgaatgttcgggttcactgcacgcagagcttccagacgagacagctcggcagacagtttttcgtcggcttcgttacgcgctgcatcaatcaatgcacgggcagatttctcgatctgcgcttcacccagttgaaggatagcgtgaacatcctgctgcacggcgttaaccagtttgctgccggtgtgacggttaaccgcgttaagctggcggttaaaggtttcaaactctacctgcgccgccaggttgttgccgtttttatccagcagcatacgtaccggcgtcggtggcaggaagcggttgagctgcaactgcttcggagcctgggcttcaaccacataaatcagttccaccaacagcgtacctaccggcaacgctttgttttttaacagtgaaatcgtgctgctaccggtatcgccagaaaggatcagatccagaccgttgcggatcagcggatgctcccaggtaataaactgtgcatcttcacgcgccagcgccacttcacgatcaaaggtgatggtgatgccatcttccgacaggccagggaagtccggcaccagcatatgatcggacggcgtcagcacgatcatgttgtcgccgcgatcgtcctgattgataccgataatatcgaacaggttcatggcgaaggcgatcaggttggtatcgtcatcctgctcttcaatgctttctgccagtgcctgggctttttcgccaccgttggagtggatttccagcaggcggtcacgaccctgttccagctgtgctttcagcgcttcatgttgctcgcggcagtttttgatcagatcgtcaaagccttcggtttgatccggtgaagccagatagttaatcagatcgttgtatacgctatcgtaaatagtgcgtccggtcgggcaggtgtgctcaaatgcatccagaccttcgtgataccagcgcaccagcaccgactgagcggttttctccagataaggcacatggatctgaatatcgtgcgcctggccgatacgatccagacgaccaatacgctgctccagtagatccgggttgaatggcaggtcaaacatcaccatgtggctggcgaactggaagttacgtccttcagaaccgatttctgagcacagcagtacctgtgcgccggtgtcttcttcggcaaaccaggcggcagcgcggtcacgttcgataatcgacataccttcgtggaacaccgcagcgcgaataccttcacgttcgcgcagtacctgctccagttgcagcgcagtggcagctttggcgcagatcaccagcactttctgagagcgatggctggtcaggtagcccatcagccactcaacgcgcggatcgaagttccaccaggtggcgttatcaccttcaaattcctgataaatacgctccgggtagagcatatcgcgagcacgatcttccgcacttttacgtgcgcccataatgccggagactttaatagccgtctgatactgcgtcggtagcggcagcttaatggtgtgcagctcgcgtttcgggaatcctttcacaccgttacgcgtgttacggaacagcacgcggctggtgccgtggcgatccatcagcatcgaaaccagctcctgacgggcgctctgggcatcttcgctgtcgctgtttgctgcctgcaacagcggctcgatatcctgctcgccgatcatctcgccgagcatgttcagttcgtcattgctcagtttgttacctgccagcagcatggcaacggcgtccgcaaccggacgataatttttctgctcttcaacgaactgcgcaaaatcgtggaaacggttcgggtccagcagacgcagacgggcgaagtggctttccatccccagctgttccggggtcgcggtcagcagcagaacgcccggcacgtgctctgccagttgttcaatggcctgatattcacggcttggcgcatcttcgctccacaccaggtgatgcgcttcatcgaccaccagcaggtcccattcggcttcacagagatgttccaggcgctgtttgctacgacgggcaaaatccagcgagcaaatcaccagctgttcggtgtcaaacgggttgtaagcatcgtgctgagcttcggcataacgctcatcatcaaatagcgcaaagcgcaggttgaaacggcgcagcatttctaccagccactgatgctgtaaggtttccgggacgataattagcacacgttcagcagcgccagagagcagttgctgatgcaggatcatcccggcttcaatggttttccctaaacccacttcgtcagccagcaggacgcgcggcgcgtggcggcgaccaacatcatgagcgatgttgagctgatgcgggatcaggctggtacgctgaccgcgcaggccgctgtacggcatacggaactgttcgctggaatatttacgcgcgcgataacgcagcgcaaagcggtccatacggtcaatctgcccggcaaacagacggtcctgcggtttgctgaacaccagtttgctatcaaggaaaacttcacgcagggctacgccggactcttcagtatccaggcgagtaccgatataggtcagcaagccattttcttcttttacttcttcgacttgcatctgccagccgtcatggctggtaatggtatcaccagggttgaacatcacgcgggtcacgggggaatcactgcgtgcgtacagacggttttcaccagtagatgggaaaagtaaagtgacagttcgcgcatccaccgcgacaacggttccaagtcccaattcgctttctgtatcgctgatccagcgttgaccaagtgtaaaaggcatatgtgttcggctctatatctttaattgcaggcaataaccacccgctaccgtgcttatgaggtagtggtgttattcaggtccaggaatggaaagggcgctatggtactggatggcaaagcattcgtcacgcatcaaaatggtatctggcgaactcttttttttgctcaaaatagcccaagttgcccggtcataagtgtagcaaaattatcctcaataaaagggagtattccctccgccacgggttgtagctggcgggtcagatagtgttcgtaatccagtggtgaacgttggtagtccagcggctccgggccgttggtggtccatacgtacttaatggtgccgcgattctgatattgcaaggggcgaccacgcttttggttttcttcatcggcaaggcgagcggcgcgtacatgaggcggcacattacgctgatactcgctcagcggacggcgaaggcgtttacggtaaaccagtcgcgcatccagttcacccgccatcagtttgtcgatggtttcgcgtacatattcctgatatggctcgttgcggaagatgcgcaggtatagctcctgctgaaactgctgggccagcggcgtccagtcggtgcgcacggtttccagccctttaaacaccatccgctgcttgtcgccctcctgaatcagtccggcataacgctttttactgccggtatcggctccgcgaatggttggcatcagaaaacggcagaaatgggtttcatactccagttctaatgcgctggtcagccgttgtttttgcagcgtttccgcccaccaggcgttaacgtgctgcaccagtgcacgaccgattttcgccgcttcttcttccgaatgtgcgcctttcagccagacaaacgttgagtcggtatcgccgtagataacgtcgtagccctgtgcttcaatcaacgctttggtttgccgcatgatctgatgaccacgcatggtgatcgacgatgccagccgcggatcgaagaagcggcaggcggtggtgccgagcacgccataaaaggcattcatgatgattttcagcgcctgcgacagcggtttgttaccctggcgtttggcttcatcgcgcccgtgccagatgttagtcacaatctccggcaggcaatgtttttctcgcgagaaccaggcatcgagaaaaccttcggtactgtgctctggatcaggctgcgccatgccttccaccagcccgacgggatcaatcagaaaggtgcggatgatcgacgggtacaggcttttatagtccagcaccagcactgaatcataaagccctggccgtgaatccatcacgtagccgccagggctggcgtgcggcggcacttcgccgagattaggcgcgacataaccagcgcgatgcattcgcggaaaatagagatgaccaaatgccgccaccgaaccgccgtgtcggtccaccggcaggccgttcaccgttgcccgttcgagtaaaaatggcatgatttcagttttgtggaagatctgcgtcaccagctcgcaatctttcaggttataagttgccagcgcaggtttatcttcggcgaaacggcggtcaatttcgtccattcgatcccacgggttatcgatagattttccttcgcctaatagctcctgagcgacagtttccagcgagaatgaagagaaattccagaacgcggatttcagcgcctcgataccgtcgataattagccgacctttagcctgggcaaaaaagacgccgtttttaaagccgtgctcgcgccactccagctcgctattatcgcgcccaagacgcagcggaagacggtaacgctcggcatgtttttgcagcattcgcagatcgaactgcaccacgttccaaccgatgatcacatcaggatcgtagttggcaaaccaggcgttgagtttttccagcaactgcgggcggctggcgacgtattccagttcgaaatcaagcgaggaggcgtcgccattctccggccccagcatataaacgatgcgctgcccgcagccttccaggccgatgcagtacagctcaccgtggcgggtggtttcaatatctatagaaacccacttgagcggcggacgatagtcgggatgcggtttcagacgggcattaacgatagtgccattgtgcatatcaccctcgacccacaccggtgaggtgataaaccgctccatcagatagcgttctggcggacgcacatcggcctcgtagacggtaacgccaccttcacgcaggcgcttttcgtaattcatcaattggcgatgggcgcgacagtaaaggccatacaccggctggcggtgaaaatcctttaacgccagcggtgtcaggcgaaagccttgttcaccctgcaaaatatgctgagcgcggggaacctgatcggcgggaataaacgccacggactcttgcggtgcaagcgtaacctgcaacggcccgttgtccgtcgccagccagaaggagacttctgtcccttgcggggtgtcccgccagtgtcgggttaagataaaacctgcctgcgccacgctgaaaatccatcaaaaaaccaggcttgagtatagcctggtttcgtttgattggctgtggttttatacagtcattactgcccgtaatatgccttcgcgccatgcttacgcagatagtgtttatccagcagcgtttgctgcatatccggtaactgcggcgctaactgacggcagaatatccccatataagcgacctcttccagcacgatggcgttatgcaccgcatcttcggcatttttgccccatgcaaacgggccgtgggaatggaccagaacgccgggcatttgcgctgcatcgataccctgtttttcaaaggtttctacgatgacgttaccggtttcccactcatattcgccgttgatttctgcgtcggtcattttgcgggtgcagggaatggtgccgtagaaatagtcggcgtgggtggtgccggttgctggaatcgactgacccgcctgcgcccagatggtggcgtggcgcgagtgcgtatgcacaatgccgccaatggaggggaatgcctgatagagcagccggtgagttggcgtgtcggaggagggctttttcgtaccttcaaccacttcaccggtttcgatgctaaccacgaccatatcgtcagcggtcatgacgctgtaatcgacgccggaaggtttgatcacaaagacgccgcgctcgcgatcaacggcgctgacgttgccccatgtgagcgtgaccaggttgtgttttggcagcgccaggttggcttctaatacctggcgtttgagatcttctaacatgttgactccttcgtgccggatgcgctttgcttatccggcctacaaaatcgcagcgtgtaggcctgataagacgcgccagcgtcgcatcaggcgttgaatgccggatgcgctttgcttatccggcctacaaaatcgcagcgcgtaggcctgataagacgcgccagcgtcgcatcaggcgttgaatgccggatgcgctttgcttatccggcctacaaaatcgcagcgtgtaggccagataagacgcgtcagcgtcgcatcaggcgttacataccggatgcggctacttagcgacgaaacccgtaatacacttcgttccagcgcagcgcgtctttaaacgctggcaggcgtgtgtcgttatcaatcaccgtgatttcaatgtcgtgcatctcggcgaattggcgcatatcgttgaggttcagtgcatggctgaagacggtatggtgcgcgccaccagcgaggatccacgcttcggaagcagttggcagatccggttgcgctttccacagcgcattcgccaccggcagtttcggcagggagtgcggtgttttcaccgtgtcgatgcagttaaccagtagacggtaacgatcgccgagatcaatcaagctggcgacaatcgctgggccggtttgggtattgaagatcaggcgggcaggatcgtccttaccaccaataccgagatgctgaacgtcgaggatcggtttctcttctgcggcgatcgacgggcagacttccagcatatgggagccgagcaccaggtcattacctttctcgaagtgataggtgtagtcctccataaaggaggtgccgccctgcagaccggttgacatcaccttcatgatgcgaagcagggcggcagttttccagtcgccttcgcccgcaaagccgtaaccctgctgcatcagacgctgtacggccagaccaggaagctgtttcagaccgtgcaaatcttcaaaggtggtggtgaacgcgtggaagccaccttgttccaggaaacgcttcatccccagctcaatacgcgccgcttccagcacgttctgtcgttttttgccgtggatttgtgtggcaggcgtcatggtgtagcagctttcgtactcatcgaccagcgcgttaacatcgccgtcgctgatggagttcaccacctgcaccagatcgccaaccgcccaggtattgacggagaaaccgaacttgatctgtgcggcaactttatcgccatcggtgaccgccacttcacgcatgttatcgccaaatcggcagactttcagatgacgggtatcctgtttagagaccgcctgacgcatccaggagccgatacgctcatgggcttgtttatcctgccagtgaccggtaaccacggcatgttgctgacgcatacgcgcgccaatgaagccgaactcgcgaccgccatgtgcagtctggttcaggttcataaagtccatatcgatactgtcccacggcagcgccgcgttgaactgggtgtggaattgcagcaacggtttgttgagcatggtcaggccgttgatccacattttggccggggagaaggtgtgcagccacaccaccagaccagcgcaacgatcgtcgtaattcgcgtcgcggcaaatagcggtgatttcatccggcgtggtgcccagcggtttcaacaccagtttgcagggcagtttcgcttccgtattcagcgcattaacgacgtgctcggcatgttgggtgacctgacgcagggtttccgggccatacagatgctggctgccaatgacaaaccacacttcataattatcaaaaatcgtcattatcgtgtccttatagagtcgcaacggcctgggcagcctgtgccggggcggaagttggaagatagtgttgttcggcgctcatcgcccattgctgatagcggcgataaagctgttcaaagcgttgtgcctgctcgctgcacggttgcagggttttctctaccgcactggccattttttgctgagctgatgggatgtctgcgtgcactttcgcggcgacggcagcaaaaatcgccgcaccgagcgcacagcactggtcagaggcaacaatttgcagcgggcgattcagcacgtcgcagcaggcctgcataatgacctggtttttccgcgcgatgccgcccagtgccatcacgttattaacggcgatcccctgatcggtaaagcactccatgattgcgcgtgcgccaaaggcggtggcagcaatcaaaccgccgaacagcagcggagcgtcggtagcgaggttaagatcggtaatcacccctttcaggcgttggttagcgttcggtgtgcggcggccgttaaaccagtcgagcaccaccggcaggtgatccagagacggatttttggcccatgcttcggtcagcgccggaagcagttgtttctggctggcgttgatttgcgttttcagttccggatgctgggcggcaagctgttccagcggccagccgagtacgcgaccaaaccaggcgtagatatcaccaaacgccgattggcctgcttccagaccgataaatccaggcaccacgctgccatcaacctgaccgcaaatacctttaactgcccgctcgccaacgctctgtttgtcggcaatcagaatgtcgcaggtggaagtaccgataacttttaccagtgcgttaggctgtgcgcctgcgccaactgcgcccatatggcagtcaaacgcgccgccggaaatcaccacgctttcaggcaggccgagacgctgcgcccattccgggcataaggtgcccaccggaatatcggcagtccaagtgtcagtgaacagcggggaaggcaaatggcgattgaggatcgggtccagctcatcaaagaaactggctggcggcaggccgccccagctttcgtgccacagagatttatgcccggcgctgcaacgtccgcgacgaatatcctgcgggcgggtggtaccggaaagcagagctggcacccagtcgcacagctcaatccacgatgcggcagattgcgccacggcgctgtcctggcgagtcacatgcaggatttttgcccagaaccattcgctggaataaataccaccaatgtagcgggagtagtcaacgttgcccggcgcgtggcacaaacgggtaatctcttccgcttcttcaaccgcagtgtggtctttccacaatacgaacatcgcgttcgggttttcggcaaactccgggcgcagcgccagcacgtttccgtcggcatcaatcggtgcgggcgtcgagccggtactgtcaacgccaatcccgaccacagctgcgcgctgttcgacgctaagctctgcaagcacggttttcagtgccgcttccattgactcaatgtagtcacgcggatgatgacggaactggttattcggggcatcacaaaattgccctttctgccaacggggataccactctacgctggtggcgatctcttcaccggtagcgcagtccaccgccaaagctcgcacagaatcactgccaaaatcgaggccaattgcaatcgccatcgtttcactccatccaaaaaaacgggtatggagaaacagtagagagttgcgataaaaagcgtcaggtaggatccgctaatcttatggataaaaatgctatggcatagcaaagtgtgacgccgtgcaaataatcaatgtggacttttctgccgtgattatagacacttttgttacgcgtttttgtcatggctttggtcccgctttgttacagaatgcttttaataagcggggttaccggttgggttagcgagaagagccagtaaaagacgcagtgacggcaatgtctgatgcaatatggacaattggtttcttctctgaatggtgggagtatgaaaagtatggctgaagcgcaaaatgatcccctgctgccgggatactcgtttaacgcccatctggtggcgggtttaacgccgattgaggccaacggttatctcgatttttttatcgaccgaccgctgggaatgaaaggttatattctcaatctcaccattcgcggtcagggggtggtgaaaaatcagggacgagaatttgtctgccgaccgggtgatattttgctgttcccgccaggagagattcatcactacggtcgtcatccggaggctcgcgaatggtatcaccagtgggtttactttcgtccgcgcgcctactggcatgaatggcttaactggccgtcaatatttgccaatacgggtttctttcgcccggatgaagcgcaccagccgcatttcagcgacctgtttgggcaaatcattaacgccgggcaaggggaagggcgctattcggagctgctggcgataaatctgcttgagcaattgttactgcggcgcatggaagcgattaacgagtcgctccatccaccgatggataatcgggtacgcgaggcttgtcagtacatcagcgatcacctggcagacagcaattttgatatcgccagcgtcgcacagcatgtttgcttgtcgccgtcgcgtctgtcacatcttttccgccagcagttagggattagcgtcttaagctggcgcgaggaccaacgcattagtcaggcgaagctgcttttgagcactacccggatgcctatcgccaccgtcggtcgcaatgttggttttgacgatcaactctatttctcgcgagtatttaaaaaatgcaccggggccagcccgagcgagtttcgtgccggttgtgaagaaaaagtgaatgatgtagccgtcaagttgtcataattggtaacgaatcagacaattgacggcttgacggagtagcatagggtttgcagaatccctgcttcgtccatttgacaggcacattatgcaagcattgctggaacactttattacccaatccaccgtgtattcattgatggcggtggtgttggtggcctttctggagtcgctggcgctggtcggtttgattctacccggtacggtgctgatggcggggctgggagcgctgattggcagcggcgagttaagtttctggcacgcctggctggcagggattattggctgcttgatgggcgactggatttctttctggctgggttggcgttttaaaaagccgttgcatcgctggtcatttctgaagaaaaacaaagcactacttgataaaactgaacatgcgttgcatcaacacagcatgttcaccattctggtcggtcgttttgttggcccgacgcgtccgctggtgccaatggtggcgggaatgctggatctgccggtggctaaatttattacgccgaatattatcggctgcctgctgtggccgccgttttacttcctgccagggattctggcgggcgcggcgatcgatattcctgccggaatgcagagcggtgagtttaaatggttgctgctggcaacagcggtgtttttgtgggttggtggctggctgtgctggcggttatggcgcagcggtaaagcgactgaccgtttgagtcattatttgtcccgcggtcgtttgttgtggctgacgccgttgatttctgccatcggcgtggtggcgctggtggtgttaattcgccacccgttgatgccggtgtatatcgatattttgcgtaaagtggttggggtttaggagatagtcttgtgcgggttgcctgatgcgacgcttgccgcgtcttatcaggcctacaaaacgcactacccgtaggtcggataaggcgttcacgccgcatccgacagtgcatactaacccgtaatccccaatagtgccgaagcactcgccttaccgctcaacaactcattggtcataccctgccaggcgatgcgcccgtcggcgactactaccgagcgcgtggcgatccgcgccgcatcttccacgctgtgcgacaccatcaatagcgtcattttttgctgctggcagctcgtgctcaccagcgtcaacatctcctgacgtaacgccggatcgagcgcagagaacggttcatcgagcaataaaatcggctgttcgcgtaccagacaacgcgctaacgccactcgctgtcgctgaccgccggaaagctcgcccggtaaccgcgccattaaattatcaatccccatctggcgggcgatagcgtgcattttcccctgctgtaccgcgttcagtttcaatcccggatttagccccagcccgatgttctgtgcgaccgtcaggtggctgaacaggttgttctcctgaaacagcatcgacaccggacggcgtgacggcggcatagttgtgtgatctacgccatcgatagtcagcgaaccgctggctggcgtcagaaaaccggcgatcaaattcagcagggtacttttacccgcgccgcttggcccgaggatcgccacctgctcgccgcgttccaccgttaagctaaaacgcatcggcaaatggtggtaaagccaggtgatatcagtcagttttaacatttcgccccggtagtttttcaatcacggtaaacagcagaaaacagagcagcagcagaattaacgcggtgaccgcaccgtcctggctgcgataggagccaatttgctggtagagataaaacggcagggtgcggaaatcatcgttaccgaacaacgccaccacgccaaaatcaccaatcgacagcacgcatgcaaaggccagcgcctgcgccagtggacgtttcagggcgcgcagctccaccacttttaagcgtgaccagccttcaatccccagcgactgacataacatgctgtagcgggcggtgatatcgcgcatcgggttttccagcactttcagcgcataagggatcgccattaacgcattggtgaaaatcacaatgccgtcagcagattgtggcaggccgatagtgttgttgagcagtaaaaagaagccggtagccagcacaatccccggcatggcgaggatcaacatgccgctcatctccagcacctgacccgccagcattttctgccgcgcccgcagttcgcgactgctccatagcagcatcatggtcagcactacgcacaatacacctgccgccagcgcaatacgcaacgaggtccacagcgcctgccacagcaccggttgtgccagcacttccggcaactggcgatttaccccatcgacgatcaccgccagtaacggtggcagcaacagcagcagcgccagcacaattaacaccgtgtcgcaaatgcggctatgcagacgatcgtccgggtcgcgccagccttgcagcagcgtggtgccgggcgcaatggccttactcaatcgctgactcaacagcaccagcccgaggcagcacaccatctggagcagcgccagcattgccgcgcgggcaggatcgtagtcgtaactcagcgcctgatagattgccagctcgatagtggtcgcctgcggaccgccccccagcgatagcacggtggcgaagctggcgaaacagagcataaagataagcgcagcaaccggcgggatttgtcgccgtaaccacggccattcgacgaagcggaaaaaatgccagctacgcatcccaagctgggcggcaagttgacgctgttcgccggggatgttttccagtgcctggagtaataagcggctcgccatcggcagattaaaaaacacatgggccagcaaaataccttgcaggccgtagggcgaaaaggtccactccagaccgagcgattggcagagtgttgccagccagccctggcgaccatagacgctaagaatgccgaaaacagcgaccaacaccgggaggatcaaggtcattgcacacagacgcaacagcgccagccgacccggaaagcgcctgcgatagagcgcgcgggcgaggaatatcgcgggtatgacagagagcagtgccgagagaaacgcctgccagaaggagaagcgcaccacatgccacagatagctgtcctgccagactgccacccagtcatcctgcggcgcgttccaccacagggcgagaaacgccgccagcgcaaccgctaccaccagcgtggtggcgcttacacctggaattaaccagccgggaattaacggctgacggcgcgttgccattcgctaatccatgcctgacgttgtgccgccacttcggctggcgtgaactccaacgtggttgcgggtttggtcaatttttcaaaaccggcaggcagcgtgacgtttgccaccggatacatccagttgccggttgggatcgcattctggaaagccggagaaaccataaactggaggaatttttgcgccagctccggctgcttgctggcagcggtgcgggcggcgacttccacttgcagatagtgaccttcgctgaagttcgcggcggcgtagttatctttcttctcttcgagaatgtgataagccggagaggtggtgtaactcagtaccagatcgctttcaccttttaaaaacaggccgtaggcttcgctccagcctttggtgaccgtgaccgttttcttcgccagtttctgccaggcttgtggggcgtcatcgccatagactttttgcatccatagcaacagacccagccccggtgtactggtgcgcggatcctgataaatcacccgccagttttgatcgctctcaaccagttctttcaggctttgtggcgggtttttcagtttgttcttgtcataaacgaaggcgaagtagccataatcaaacggtacgaaagtgtcattattccagccgccgggaacgttaacggcatccgctgccacaccgcttttggcaaacagtccggttttactggcggcgtctaacaggttgttatccagccccagcaccacatcggctttactgtttttgccttccatccgtagacggttgagaagcgaaacgccatcttccagcgccaccagtttcagttcgcaattacagtcggcttcaaaggcttttttaaccaccggaccaggcccccagtcggcggcgaaggaatcgtaggtataaacagtcagaacgggtttagcgaaaacgggcgctgtgcacagcaacagcaggggcagacatttttttaacactttgcacctcaaaaaagagtggcaaaggacttgagaaggagcctcaaatcccttcgccggcgttatccggatcaggttcgacgggtattttctcagcgcacgcgtacgcgtggcaccccgttgagaacggcgttagtgtagtgattttgttatcaaccagcaatcatggatccggtggcgcaaaccacgctgatttaaaatcgaaccagccgagggtattcatgcgcaggccgcgcatactgcgttgcccctgaatgatcagccagtggtgcaataatggcaccatcgctttgctggcgaccagttgctggcaccagttcgccagattcatctcgccattgcgccagcgagcagcgtcggcttgccagtcaatgggaatgcaatgttgtagcagtggcacttcgcataaatgtgcgaaaacagagaagtccagcggcagggtaaagttggcgctgtttagccagatatcactttcgatctctcctgtatgccactgatcgtagtcgatctctttgattttcagcgtgacctggtgacttgccagaatctgctgcatgatcccggcaatcacccgatgctcactgtgatcctgataaaaggttagggtgaggctttccaggccagccggtttttcgctctttatggtgcgggcatggtgccaacgggggagcagtccataagccgggaaccacagttgctggtactgttcctcagcgaaatagaccagattagttggagaaagcacatagcttacccagtccctgacttgctgattcgccccgcgatgggtgcggctgtcgaacagtaaatagtagcaaccttcctccaggcggctttcaatctctttttcctcgccctgtggaccttttagcatcagccctccggctggctcgtcggcaatttccggcagaacccagacgttaacttcgtcgattaatgcccggtaaccgaagaagtcatcgaatgcctgaattttcagttgattggtgctgttgcgaatcaccgcatacggaccggtgccgatgggatggctggcaaagttactgagggtttcccattcgcgcggcaggatcatcgccggaacttgccccagcagtaacggtaaccagcggtccggttgcgtgagatggatatccagcgtccagggcgtcggcgacacaatgtcagcaatatgcgaatagagcggcagcgtattgattcgttttaaagaggcgatcacatcgtccatttccagttcacgaccatggtgaaaatggactcctggacgcaaaaagaaacgccagtgaagcggtgaaatttgctgccagtggtgggcgatgtctgcttccagttccccattttcctcatttatgcgcgttagcgaactgaagatttgccgggcgatatgggtttcggaacggcgcaatgcgctgccaggtagcagattacgcaacggacgatagtagagcacgcgcaggatgtgccgcccctggcggaagctgcggcccagatgagaaaccagcatttgccgcacagtcgctttgtcgccaaccaactgcaccagttgatcgatacgatcctgctccagcaggtcttccgcccgctgttgctgaagcgccagcccggtatagaggaatgtcagacgcgagcgtttaccgcgcccgacttccgcttcccacgtcagccagccgcgatcctgcatggtgttgagcagggtgcgcatatgacgacgcgagcagctcaataacgctgccagttcgttgagcgttgtgtcctgcgatttaccctcgcagcattgccacaggcggatgaactgttgttgcagacgagcagatggcataaaaggggaactcctgtgcaaaagacagcaattttattttccctatattaagtcaataattcctaacgatgaagcaagggggtgccccatgcgtcagttttatcagcactattttaccgcgacagcgaagttgtgctggttgcgttggttaagcgtcccacaacgattaaccatgcttgaaggactgatgcagtgggatgaccgcaattctgaaagttgacttgcctgcatcatgtgtgactgagtattggtgtaaaatcacccgccagcagattatacctgctggttttttttattctcgccgcgctaaaaagggaacgtatgatctggataatgacgatggctcgccgtatgaacggtgtttacgcggcatttatgctggtcgcttttatgatgggggtggccggggcgctacaggctcctacattgagcttatttctgagtcgtgaggttggcgcgcaacctttctggatcggcctcttttatacggtgaatgctattgctgggatcggcgtaagcctctggttggcaaaacgttctgacagtcagggcgatcggcgaaaactgattatattttgctgtttgatggctatcggcaatgcgctattgtttgcatttaatcgtcattatctgacgcttatcacctgtggtgtgcttctggcatctctggccaatacggcaatgccacagttatttgctctggcgcgggaatatgcggataactcggcgcgagaagtggtgatgtttagctcggtgatgcgtgcgcagctttctctggcatgggttatcggtccaccgttggcctttatgctggcgttgaattacggctttacggtgatgttttcgattgccgccgggatattcacactcagtctggtattgattgcatttatgcttccgtctgtggcgcgggtagaactgccgtcggaaaatgctttatcaatgcaaggtggctggcaggatagtaacgtacggatgttatttgtcgcctcgacgttaatgtggacctgcaacaccatgtacattattgatatgccgttgtggatcagtagcgagttaggattgccagacaaactggcgggtttcctgatggggacggcagctggactggaaataccagcaatgattctggctggctactatgtcaaacgttatggtaagcggcgaatgatggtcatagcagtggcggcaggagtactgttttacaccggattgattttctttaatagccgtatggcgttgatgacgctgcaactttttaacgctgtatttatcggcattgttgcgggtattgggatgctatggtttcaggatttaatgcctggaagagcgggggcagctaccaccttatttactaacagtatttctaccggggtaattctggctggcgttattcagggagcaattgcacaaagttgggggcactttgctgtctactgggtaattgcggttatttctgttgtcgcattatttttaaccgcaaaggttaaagacgtttgatgacgtggacgatagcggaaagcccggtcatttgaccgggcaaggggattaattcataaacgcaggttgttttgcttcataagcggcaatggcgtcgtcgtgctgcaaggtaagcccaatactgtccagaccgttcatcatgcagtggcggcggaaggcatcgatggtaaagcgataggttttctctcccgctttcacctcttgcgcttccagatccacgtcgaaatggatccccggattagctttcaccagcgcaaacagttcgtccacttctgcatcgcttaatttcaccggcagcagctggttgttaaagctattgccgtagaagatgtcagcaaaactcggcgcaatcaccactttaaaaccgtagtcggtcaatgcccagggcgcgtgctcacgcgaagagccacagccgaagttttctcgtgccagcaaaatggaagcgccctgatactgcgggaagttcagcacgaagtccgggtttggctgttggcctttttcatccagaaaacgccagtcgttaaacagatgcgcgccaaaacccgtacgggtcactttctgcaaaaactgtttcgggatgattgcatcggtatcgacattggcggcatccagcggaaccaccaggcctgtgtgtttgataaatttctctgccatggtgtgctccttatttaatgttgcgaatgtcggcgaaatgtccggtcacagcagcagcggcagccattgccgggctgaccagatgcgtgcgcccgccgcgcccctggcggccttcaaagttacggttgctggtggaggcacaacgttcgcccggattcagacggtcgttgttcatcgccagacacattgagcagccaggcaagcgccattcaaaaccggcttcaataaagattttatccagaccttccgcttccgcctgggcttttaccgggccagagccgggaaccaccagtgcctgcacgcctggcgcgacttttcgccctttggcgatctccgctgccgcgcgtaaatcttcaatgcgcgagttggtacaggaaccgataaacactttgtcgatagccacttcggtcagcggaatacccggtttcagccccatataggccagcgctttttctgccgacgcgcgttcaaccggatcggcaaacgaagccggatcgggaatattgtcgttcacggaaatcacctggccgggattggtgccccaggtgacctgcggtgaaatttcttctgcttgcagagtgacaacggtatcgaaagttgcgccttcgtcggtttgcagggttttccagtaggcaacggcgtcgtcgaaatctttgcctttcggcgcatgcagacggcctttgacatagttaaaggtggtttcgtccggtgcaaccagaccggcttttgcgcccatttcgattgccatattgcacagggtcatacgaccttccatgcttaaatcacggattgcttcgccgcaaaactccaccacatgcccggtgccgcctgcgctaccggttttaccgataattgccagcacgatatcttttgcggtaatgcccggcgcggctttgccctggacttcaattttcatggtttttgcgcggccctgtttcagggtttgcgttgccagtacgtgttcaacttcggaagtgccgataccaaaggccagtgcgccaaacgcgccgtgggtggcggtatgcgagtcgccgcagacaatggtcatccccggcaaggtgacgccctgttccggccccattacgtggacgatcccctgatacgggtgattcaggtcatacagttcgacgccaaattctttgcagtttttgatcagttcctgcatctggatacgcgccatttcaccgcaggcattaatgtctttggtctgggtagagacgttgtgatccatggtagcgaaggttttgcccggctgacgtaccgggcgaccgtgggcgcgcagaccatcgaacgcctgcggtgaggtcacttcatgcaccaggtggcggtcgatatataacagtggggtttcgttttcggcttcgtacacaacgtgagcgtcgaacaatttttcgtataacgtcttagccatgattacaccccttctgctacatagcgggcaatgatatcgcccatttcatcggtactaacggcggcagcgccacgggctaaatccccggtgcgaatgccttcttctaatgcgcggttaatggcgcgttcaatggcgcaagccgcatcatcggcatccaggctgtaacgcagcagcagtgccagcgaaaggatttgtgcaatcgggttggcgatgtttttgcctgcgatatctggtgccgagccgcccgccggttcatacagtccaaaaccttgctcgttcaggctggcggaaggcaacatccccatcgagccagtgatcattgcgcactcgtcagacagaatgtcgccaaacaggttggagcacagcagaacgtcaaactgtgatggatctttaatcagctgcatggtggcgttgtcgatgtacatatgcgccagttcgacatccgggtattccgtggcgatctcgttaacgatctcccgccataaaatagaggattgcagcacgttggctttatcgatcgacgtcactttgtggcgacgcttgcgagcagattcaaacgcgatgcgggcgatacgttcgatctcaaaacggtgatacacctcggtatcaaaggctttttcatattgtccgctaccttcgcggccttttggctgaccgaaatagatgccgccggtcagttcgcgcacacacaggatgtcgaagccgtttgcggcaatgtctgcacgcagcggacagaatgcttccagcccctgatacagttttgccgggcgcaggttgctgaataatttgaagtgcttacgcagaggcagcagcgcgccgcgttctggttgctggtctggtggtaaatgttcccacttcgggccgcctaccgagccaaacagcacggcatcggcttgctcacaaccttcaaccgtcgcaggcggcagtggttgcccgtggttatcaatggctgcgccgcctacatcgtaatggctggtggtgatgcgcatcgcaaagcggttgcgcacggcatccagcactttcagcgcctgggtcatcacttccggaccaataccgtcccccggcaatacggcaatatggtaattcttcgacatcacacggtttccttgttgttttcgttgtgttgagctttgcgttgcaactctttttcgacttctgcggcacgccagatattgttcagaacgtgcaccatggctttggcagatgactcgacaatatcggtagccaggccgacgccgtggaagcggcgaccgttgtagttagcgacgatatccacctgacccagcgcatctttaccgtggcctttggcggtcaggctgtatttcaccagttcgacgttatattcagtgatgcggttaattgcctgatagacggcatcgaccggaccgttaccgttggcggcttctgctttgacttcttcgccacaggccagtttgacggcggcggtggcgatatcgttagagccagactgcacgctgaagtaatccagacggaaatgctccggctcttcttgctgcttaccgatgaaggccagcgcctccagatcgtaatcaaacacctgaccttttttgtccgccagcttcaggaaagcatcgtacaaattgtctaaattatattcactttctttataccccatctcatccatgcgatgtttcaccgccgcacgccccgaacgagaggtcagattcagctggatttggttcagaccaatagattctggtgtcatgatttcgtagttttcgcggtttttcagcacgccatcctggtgtataccggaggagtgtgcgaatgcgccgctgccaacaatggctttgtttgccgggatcggcatattacaaatctggctaactaactggctggtgcgccatatctcctggtgattaatggcggtgtggacgttgagaatatccttacgaactttgatcgccatgatgacttcttccagggaacagtttccggcacgctcgccgatcccgttcattgcgccttccacctggcgtgcaccggcatgtaccgccgccagtgagtttccgaccgccaggcccaaatcgtcgtgggtatgtacggagataatggctttgtcgatgttaggcacgcgttcatacaggccgctgatgattccggcgaactcaaacggcatggtgtagcccacggtgtccggaatgttgatggtggtggcaccggcattaatcgccgcttcgaccactcgcgccagatcggcaatgggtgtacgcccggcatcttcgcaagaaaattcaacatcatcggtgtaattacgggcgcgtttcaccatatagatagcgcgttcgatcacctcgtccagcgtgctgcgcagcttggtggcgatgtgcattggcgaagtggcaataaaggtatgaatacggaaggcttcggcgactttcagggattcggccgccacgtcgatatctttttccacgcagcgagctaacgcacatacgcggctgtttttaacctggcgggcgatggtttgcaccgattcaaaatcgcccggcgaagagacggggaaaccgacttccatcacgtcaacacccatacgctcaagggccagcgcaatttgcagtttttctttcacactcaagcttgcctgtaacgcctgttcaccgtcgcgcaatgtggtatcgaaaataatgacttgctggctcatggtttgggtccttgtctcttttagagcgcctcgcttcgggcataaaaaaacccgcgcaatggcgcgggttttttgtttgactgcgtgctggcttaatgctggatgccgctcactcgtctaccgcgcaaagaagatgcgtttagtagtagtagaccgataaagcgaacgatgtgagtcattaaatcagctccagatgaatgcgatatgcttttagagttactggatacaaaaacggatgtcaaccctgacgcaataaaaacgtcccgccagcgtgagttctgcatccgtaaaattagctaattgtgctgcggtggttaaagtaagcgatattaatttctgcttaactaccgacgcttttcatcggttgacatatttcagcataaatttttgcatctaatcaacgaggaaaaaggggacaaaatgcacgcgttgcaaaacctatcctgatgatttgtattgaattatatgttttgcgattttttttgatattgatttggtgaatattattgatcaattaatgttaagaattaatgcattaaatatataaattaattattaaataagcacatttaatccattttgtagatgattgagtattcgcggtagttatgattagattgttttcgcaacaaaaacattatggattattatgctgtggtaaatgactcattccacggcaatggattctgtttttatcagaacccgtatctttatgttttccgaattttactcattttgctttttcttattttatatgcatgataaatcatattcttcaggattatttctctgcattccaataagggaaagggagttaagtgtgacagtggagttaagtatgccagaggtacaaacagatcatccagagacggcggagttaagcaaaccacagctacgcatggtcgatctcaacttattaaccgttttcgatgccgtgatgcaggagcaaaacattactcgtgccgctcatgttctgggaatgtcgcaacctgcggtcagtaacgctgttgcacgcctgaaggtgatgtttaatgacgagctttttgttcgttatggccgtggtattcaaccgactgctcgcgcatttcaactttttggttcagttcgtcaggcattgcaactagtacaaaatgaattgcctggttcaggttttgaacccgcgagcagtgaacgtgtatttcatctttgtgtttgcagcccgttagacagcattctgacctcgcagatttataatcacattgagcagattgcgccaaatatacatgttatgttcaagtcttcattaaatcagaacactgaacatcagctgcgttatcaggaaacggagtttgtgattagttatgaagacttccatcgtcctgaatttaccagcgtaccattatttaaagatgaaatggtgctggtagccagcaaaaatcatccaacaattaagggcccgttactgaaacatgatgtttataacgaacaacatgcggcggtttcgctcgatcgtttcgcgtcatttagtcaaccttggtatgacacggtagataagcaagccagtatcgcgtatcagggcatggcaatgatgagcgtacttagcgtggtgtcgcaaacgcatttggtcgctattgcgccgcgttggctggctgaagagttcgctgaatccttagaattacaggtattaccgctgccgttaaaacaaaacagcagaacctgttatctctcctggcatgaagctgccgggcgcgataaaggccatcagtggatggaagagcaattagtctcaatttgcaaacgctaactgattgcagaataggtcagacatgaatgtctggtttattctgcattttttattgaatgtagaattttattctgaatgtgtgggctctctattttaggattaattaaaaaaatagagaaattgctgtaagttgtgggattcagccgatttattatcaatttaatcctctgtaatggaggattttatcgtttcttttcacctttcctcctgtttattcttattaccccgtgtttatgtctctggctgccaattgcttaagcaagatcggacggttaatgtgttttacacattttttccgtcaaacagtgaggcaggccatggagatgttgtctggagccgagatggtcgtccgatcgcttatcgatcagggcgttaaacaagtattcggttatcccggaggcgcagtccttgatatttatgatgcattgcataccgtgggtggtattgatcatgtattagttcgtcatgagcaggcggcggtgcatatggccgatggcctggcgcgcgcgaccggggaagtcggcgtcgtgctggtaacgtcgggtccaggggcgaccaatgcgattactggcatcgccaccgcttatatggattccattccattagttgtcctttccgggcaggtagcgacctcgttgataggttacgatgcctttcaggagtgcgacatggtggggatttcgcgaccggtggttaaacacagttttctggttaagcaaacggaagacattccgcaggtgctgaaaaaggctttctggctggcggcaagtggtcgcccaggaccagtagtcgttgatttaccgaaagatattcttaatccggcgaacaaattaccctatgtctggccggagtcggtcagtatgcgttcttacaatcccactactaccggacataaagggcaaattaagcgtgctctgcaaacgctggtagcggcaaaaaaaccggttgtctacgtaggcggtggggcaatcacggcgggctgccatcagcagttgaaagaaacggtggaggcgttgaatctgcccgttgtttgctcattgatggggctgggggcgtttccggcaacgcatcgtcaggcactgggcatgctgggaatgcacggtacctacgaagccaatatgacgatgcataacgcggatgtgattttcgccgtcggggtacgatttgatgaccgaacgacgaacaatctggcaaagtactgcccaaatgccactgttctgcatatcgatattgatcctacttccatttctaaaaccgtgactgcggatatcccgattgtgggggatgctcgccaggtcctcgaacaaatgcttgaactcttgtcgcaagaatccgcccatcaaccactggatgagatccgcgactggtggcagcaaattgaacagtggcgcgctcgtcagtgcctgaaatatgacactcacagtgaaaagattaaaccgcaggcggtgatcgagactctttggcggttgacgaagggagacgcttacgtgacgtccgatgtcgggcagcaccagatgtttgctgcactttattatccattcgacaaaccgcgtcgctggatcaattccggtggcctcggcacgatgggttttggtttacctgcggcactgggcgtcaaaatggcgttgccagaagaaaccgtggtttgcgtcactggcgacggcagtattcagatgaacatccaggaactgtctaccgcgttgcaatacgagttgcccgtactggtggtgaatctcaataaccgctatctggggatggtgaagcagtggcaggacatgatctattccggccgtcattcacaatcttatatgcaatcgctacccgatttcgtccgtctggcggaagcctatgggcatgtcgggatccagatttctcatccgcatgagctggaaagcaaacttagcgaggcgctggaacaggtgcgcaataatcgcctggtgtttgttgatgttaccgtcgatggcagcgagcacgtctacccgatgcagattcgcgggggcggaatggatgaaatgtggttaagcaaaacggagagaacctgattatgcgccggatattatcagtcttactcgaaaatgaatcaggcgcgttatcccgcgtgattggccttttttcccagcgtggctacaacattgaaagcctgaccgttgcgccaaccgacgatccgacattatcgcgtatgaccatccagaccgtgggcgatgaaaaagtacttgagcagatcgaaaagcaattacacaaactggtcgatgtcttgcgcgtgagtgagttggggcagggcgcgcatgttgagcgggaaatcatgctggtgaaaattcaggccagcggttacgggcgtgacgaagtgaaacgtaatacggaaatattccgtgggcaaattatcgatgtcacaccctcgctttataccgttcaattagcaggcaccagcggtaagcttgatgcatttttagcatcgattcgcgatgtggcgaaaattgtggaggttgctcgctctggtgtggtcggactttcgcgcggcgataaaataatgcgttgagaatgatctcaatgcgcaatttacagcccaacatgtcacgttgggctttttttgcgaaatcagtgggaacctggaataaaagcagttgccgcagttaattttctgcgcttagatgttaatgaatttaacccataccagtacaatggctatggtttttacattttacgcaaggggcaattgtgaaactggatgaaatcgctcggctggcgggagtgtcgcggaccactgcaagctatgttattaacggcaaagcgaagcaataccgtgtgagcgacaaaaccgttgaaaaagtcatggctgtggtgcgtgagcacaattaccacccgaacgccgtggcagctgggcttcgtgctggacgcacacgttctattggtcttgtgatccccgatctggagaacaccagctatacccgcatcgctaactatcttgaacgccaggcgcggcaacggggttatcaactgctgattgcctgctcagaagatcagccagacaacgaaatgcggtgcattgagcaccttttacagcgtcaggttgatgccattattgtttcgacgtcgttgcctcctgagcatcctttttatcaacgctgggctaacgacccgttcccgattgtcgcgctggaccgcgccctcgatcgtgaacacttcaccagcgtggttggtgccgatcaggatgatgccgaaatgctggcggaagagttacgtaagtttcccgccgagacggtgctttatcttggtgcgctaccggagctttctgtcagcttcctgcgtgaacaaggtttccgtactgcctggaaagatgatccgcgcgaagtgcatttcctgtatgccaacagctatgagcgggaggcggctgcccagttattcgaaaaatggctggaaacgcatccgatgccgcaggcgctgttcacaacgtcgtttgcgttgttgcaaggagtgatggatgtcacgctgcgtcgcgacggcaaactgccttctgacctggcaattgccacctttggcgataacgaactgctcgacttcttacagtgtccggtgctggcagtggctcaacgtcaccgcgatgtcgcagagcgtgtgctggagattgtcctggcaagcctggacgaaccgcgtaagccaaaacctggtttaacgcgcattaaacgtaatctctatcgccgcggcgtgctcagccgtagctaagccgcgaacaaaaatacgcgccaggtgaatttccctctggcgcgtagagtacgggactggacatcaatatgcttaaagtaaataagactattcctgactattattgataaatgcttttaaacccgcccgttaattaactcaccagctgaaattcacaataattaagtgatatcgacagcgcgtttttgcattattttgttacatgcggcgatgaattgccgatttaacaaacacttttctttgcttttgcgcaaacccgctggcatcaagcgccacacagacgtaacaaggactgttaaccggggaagatatgtcctaaaatgccgctcgcgtcgcaaactgacactttatatttgctgtggaaaatagtgagtcattttaaaacggtgatgacgatgagggattttttcttacagctattcataacgttaatttgcttcgcacgttggacgtaaaataaacaacgctgatattagccgtaaacatcgggttttttacctcggtatgccttgtgactggcttgacaagcttttcctcagctccgtaaactcctttcagtgggaaattgtggggcaaagtgggaataaggggtgaggctggcatgttccggggagcaacgttagtcaatctcgacagcaaagggcgcttatcagtgcctacccgttatcgggaacagctgcttgagaacgctgccggtcaaatggtttgcaccattgacatttatcacccgtgcctgctgctttaccccctgcctgaatgggaaattatcgagcaaaaattatcgcgtctgtcgagcatgaacccggttgagcgccgtgtgcagcgcctactgttaggtcatgccagcgaatgtcagatggatggcgcaggtcgattgttaatcgcgccagtactgcggcaacatgccgggctgacaaaagaagtgatgctggttggacagttcaacaagtttgagctgtgggatgaaacaacctggcatcaacaggtcaaggaagatatcgacgcagagcagttggctaccggagacttatcggagcgactgcaggacttgtctctataaaatgatggaaaactataaacatactacggtgctgctggatgaagccgttaatggcctcaatatccgtcctgatggcatctacattgatgggacttttggtcgcggtggtcactcacgtctgatcctctcgcagcttggcgaagaggggcgtttgctggcgatcgatcgcgacccgcaggctatcgccgttgcgaagactattgatgatccgcgcttctccatcatccacggacctttctccgcgctgggcgaatacgttgccgagcgcgatcttatcggcaagatcgacggcattctcctcgatcttggcgtctcttcaccgcaacttgatgatgctgaacgtggcttttcctttatgcgcgatggtccgctggacatgcgtatggacccaacccgtgggcagtcagccgctgaatggctacaaaccgcagaagaagccgatatcgcctgggtattgaaaacctatggtgaagagcgttttgccaaacgcattgcccgcgccattgtcgagcgtaaccgcgaacagccgatgacccgcaccaaagaactggcggaagtcgtggctgctgcaacgccggtgaaagataagtttaaacatcccgcgacccgtaccttccaggcggtgcgcatttgggtaaacagtgaactggaggagatagagcaggcgctaaaaagctcgctcaacgtgctggccccgggtgggcggctttcgatcatcagcttccactcgctggaagaccgtattgtgaaacgttttatgcgtgaaaacagccgcggtccgcaagttccggcagggttaccgatgactgaagagcagctcaaaaaactgggtggccgtcagctgcgagcactaggcaagttaatgccgggcgaagaagaggtggctgagaaccctcgtgcccgtagttcagttctgcgtattgcagagaggacgaatgcatgatcagcagagtgacagaagctctaagcaaagttaaaggatcgatgggaagccacgagcgccatgcattgcctggtgttatcggtgacgatcttttgcgatttgggaagctgccactctgcctgttcatttgcattattttgacggcggtgactgtggtaaccacggcgcaccatacccgtttactgaccgctcagcgcgaacaactggtgctggagcgagatgctttagacattgaatggcgcaacctgatccttgaagagaatgcgctcggcgaccatagccgggtggaaaggatcgccacggaaaagctgcaaatgcagcatgttgatccgtcacaagaaaatatcgtagtgcaaaaataaggataaacgcgacgcatgaaagcagcggcgaaaacgcagaaaccaaaacgtcaggaagaacatgccaactttatcagttggcgttttgcgttgttatgcggctgtattctcctggcgctggcttttctgctcggacgcgtagcgtggttacaagttatctccccggatatgctggtgaaagagggcgacatgcgttctcttcgcgttcagcaagtttccacctcccgcggcatgattactgaccgttctggtcgcccgttagcggtgagcgtgccggtaaaagcgatttgggctgacccgaaagaagtgcatgacgctggcggtatcagcgtcggtgaccgctggaaggcgctggctaacgcgctcaatattccgctggatcagctttcagcccgcattaacgccaacccgaaagggcgctttatttatctggcgcgtcaggtgaaccctgacatggcggactacatcaaaaaactgaaactgccggggattcatctgcgtgaagagtctcgccgttactatccgtccggcgaagtgactgctcacctcatcggctttactaacgtcgatagtcaagggattgagggcgttgagaagagtttcgataaatggcttaccgggcagccgggtgagcgcattgtgcgtaaagaccgctatggtcgcgtaattgaagatatttcttctactgacagccaggcagcgcacaacctggcgctgagtattgatgaacgcctgcaggcgctggtttatcgcgaactgaacaacgcggtggcctttaacaaggctgaatctggtagcgccgtgctggtggatgtcaacaccggtgaagtgctggcgatggctaacagcccgtcatacaaccctaacaatctgagcggcacgccgaaagaggcgatgcgtaaccgtaccatcaccgacgtgtttgaaccgggctcaacggttaaaccgatggtggtaatgaccgcgttgcaacgtggcgtggtgcgggaaaactcggtactcaataccattccttatcgaattaacggccacgaaatcaaagacgtggcacgctacagcgaattaaccctgaccggggtattacagaagtcgagtaacgtcggtgtttccaagctggcgttagcgatgccgtcctcagcgttagtagatacttactcacgttttggactgggaaaagcgaccaatttggggttggtcggagaacgcagtggcttatatcctcaaaaacaacggtggtctgacatagagagggccaccttctctttcggctacgggctaatggtaacaccattacagttagcgcgagtctacgcaactatcggcagctacggcatttatcgcccactgtcgattaccaaagttgaccccccggttcccggtgaacgtgtcttcccggaatccattgtccgcactgtggtgcatatgatggaaagcgtggcgctaccaggcggcggcggcgtgaaggcggcgattaaaggctatcgtatcgccattaaaaccggtaccgcgaaaaaggtcgggccggacggtcgctacatcaataaatatattgcttataccgcaggcgttgcgcctgcgagtcagccgcgcttcgcgctggttgttgttatcaacgatccgcaggcgggtaaatactacggcggcgccgtttccgcgccggtctttggtgccatcatgggcggcgtattgcgtaccatgaacatcgagccggatgcgctgacaacgggcgataaaaatgaatttgtgattaatcaaggcgaggggacaggtggcagatcgtaatttgcgcgaccttcttgctccgtgggtgccagacgcaccttcgcgagcactgcgagagatgacactcgacagccgtgtggctgcggcgggcgatctctttgtagctgtagtaggtcatcaggcggacgggcgtcgatatatcccgcaggcgatagcgcaaggtgtggctgccattattgcagaggcgaaagatgaggcgaccgatggtgaaatccgtgaaatgcacggcgtaccggtcatctatctcagccagctcaacgagcgtttatctgcactggcgggccgcttttaccatgaaccctctgacaatttacgtctcgtgggcgtaacgggcaccaacggcaaaaccacgactacccagctgttggcgcagtggagccaactgcttggcgaaatcagcgcggtaatgggcaccgttggtaacggcctgctggggaaagtgatcccgacagaaaatacaaccggttcggcagtcgatgttcagcatgagctggcggggctggtggatcagggcgcgacgttttgcgcaatggaagtttcctcccacgggctggtacagcaccgtgtggcggcattgaaatttgcggcgtcggtctttaccaacttaagccgcgatcaccttgattatcatggtgatatggaacactacgaagccgcgaaatggctgctttattctgagcatcattgcggtcaggcgattattaacgccgacgatgaagtgggccgccgctggctggcaaaactgccggacgcggttgcggtatcaatggaagatcatattaatccgaactgtcacggacgctggttgaaagcgaccgaagtgaactatcacgacagcggtgcgacgattcgctttagctcaagttggggcgatggcgaaattgaaagccatctgatgggcgcttttaacgtcagcaacctgctgctcgcgctggcgacactgttggcactcggctatccactggctgatctgctgaaaaccgccgcgcgtctgcaaccggtttgcggacgtatggaagtgttcactgcgccaggcaaaccgacggtggtggtggattacgcgcatacgccggatgcactggaaaaagccttacaggcggcgcgtctgcactgtgcgggcaagctgtggtgtgtctttggctgtggtggcgatcgcgataaaggtaagcgtccactgatgggcgcaattgccgaagagtttgctgacgtggcggtggtgacggacgataacccgcgtaccgaagaaccgcgtgccatcatcaacgatattctggcgggaatgttagatgccggacatgccaaagtgatggaaggccgtgctgaagcggtgacttgcgccgttatgcaggctaaagagaatgatgtggtactggtcgcgggcaaaggccatgaagattaccagattgttggcaatcagcgtctggactactccgatcgcgtcacggtggcgcgtctgctgggggtgattgcatgattagcgtaacccttagccaacttaccgacattctcaacggtgaactgcaaggtgcagatatcacccttgatgctgtaaccactgatacccgaaaactgacgccgggctgcctgtttgttgccctgaaaggcgaacgttttgatgcccacgattttgccgaccaggcgaaagctggcggcgcaggcgcactactggttagccgtccgctggacatcgacctgccgcagttaatcgtcaaggatacgcgtctggcgtttggtgaactggctgcatgggttcgccagcaagttccggcgcgcgtggttgctctgacggggtcctccggcaaaacctccgttaaagagatgacggcggcgattttaagccagtgcggcaacacgctttatacggcaggcaatctcaacaacgacatcggtgtaccgatgacgctgttgcgcttaacgccggaatacgattacgcagttattgaacttggcgcgaaccatcagggcgaaatagcctggactgtgagtctgactcgcccggaagctgcgctggtcaacaacctggcagcggcgcatctggaaggttttggctcgcttgcgggtgtcgcgaaagcgaaaggtgaaatctttagcggcctgccggaaaacggtatcgccattatgaacgccgacaacaacgactggctgaactggcagagcgtaattggctcacgcaaagtgtggcgtttctcacccaatgccgccaacagcgatttcaccgccaccaatatccatgtgacctcgcacggtacggaatttaccctacaaaccccaaccggtagcgtcgatgttctgctgccgttgccggggcgtcacaatattgcgaatgcgctggcagccgctgcgctctccatgtccgtgggcgcaacgcttgatgctatcaaagcggggctggcaaatctgaaagctgttccaggccgtctgttccccatccaactggcagaaaaccagttgctgctcgacgactcctacaacgccaatgtcggttcaatgactgcagcagtccaggtactggctgaaatgccgggctaccgcgtgctggtggtgggcgatatggcggaactgggcgctgaaagcgaagcctgccatgtacaggtgggcgaggcggcaaaagctgctggtattgaccgcgtgttaagcgtgggtaaacaaagccatgctatcagcaccgccagcggcgttggcgaacattttgctgataaaactgcgttaattacgcgtcttaaattactgattgctgagcaacaggtaattacgattttagttaagggttcacgtagtgccgccatggaagaggtagtacgcgctttacaggagaatgggacatgttagtttggctggccgaacatttggtcaaatattattccggctttaacgtcttttcctatctgacgtttcgcgccatcgtcagcctgctgaccgcgctgttcatctcattgtggatgggcccgcgtatgattgctcatttgcaaaaactttcctttggtcaggtggtgcgtaacgacggtcctgaatcacacttcagcaagcgcggtacgccgaccatgggcgggattatgatcctgacggcgattgtgatctccgtactgctgtgggcttacccgtccaatccgtacgtctggtgcgtgttggtggtgctggtaggttacggtgttattggctttgttgatgattatcgcaaagtggtgcgtaaagacaccaaagggttgatcgctcgttggaagtatttctggatgtcggtcattgcgctgggtgtcgccttcgccctgtaccttgccggcaaagacacgcccgcaacgcagctggtggtcccattctttaaagatgtgatgccgcagctggggctgttctacattctgctggcttacttcgtcattgtgggtactggcaacgcggtaaacctgaccgatggtctcgacggcctggcaattatgccgaccgtatttgtcgccggtggttttgcgctggtggcgtgggcgaccggcaatatgaactttgccagctacttgcatataccgtatctgcgacacgccggggaactggttattgtctgtaccgcgatagtcggggcaggactgggcttcctgtggtttaacacctatccggcgcaggtctttatgggcgatgtaggttcgctggcgttaggtggtgcgttaggcattatcgccgtactgctacgtcaggaattcctgctggtgattatggggggcgtgttcgtggtagaaacgctttctgtcatcctgcaggtcggctcctttaaactgcgcggacaacgtattttccgcatggcaccgattcatcaccactatgaactgaaaggctggccggaaccgcgcgtcattgtgcgtttctggattatttcgctgatgctggttctgattggtctggcaacgctgaaggtacgttaatcatggctgattatcagggtaaaaatgtcgtcattatcggcctgggcctcaccgggctttcctgcgtggactttttcctcgctcgcggtgtgacgccgcgcgttatggatacgcgtatgacaccgcctggcctggataaattacccgaagccgtagaacgccacacgggcagtctgaatgatgaatggctgatggcggcagatctgattgtcgccagtcccggtattgcactggcgcatccatccttaagcgctgccgctgatgccggaatcgaaatcgttggcgatatcgagctgttctgtcgcgaagcacaagcaccgattgtggcgattaccggttctaacggcaaaagcacggtcaccacgctagtgggtgaaatggcgaaagcggcgggggttaacgttggtgtgggtggcaatattggcctgcctgcgttgatgctactggatgatgagtgtgaactgtacgtgctggaactgtcgagcttccagctggaaaccacctccagcttacaggcggtagcagcgaccattctgaacgtgactgaagatcatatggatcgctatccgtttggtttacaacagtatcgtgcagcaaaactgcgcatttacgaaaacgcgaaagtttgcgtggttaatgctgatgatgccttaacaatgccgattcgcggtgcggatgaacgctgcgtcagctttggcgtcaacatgggtgactatcacctgaatcatcagcagggcgaaacctggctgcgggttaaaggcgagaaagtgctgaatgtgaaagagatgaaactttccgggcagcataactacaccaatgcgctggcggcgctggcgctggcagatgctgcagggttaccgcgtgccagcagcctgaaagcgttaaccacattcactggtctgccgcatcgctttgaagttgtgctggagcataacggcgtacgttggattaacgattcgaaagcgaccaacgtcggcagtacggaagcggcgctgaatggcctgcacgtagacggcacactgcatttgttgctgggtggcgatggtaaatcggcggactttagcccactggcgcgttacctgaatggcgataacgtacgtctgtattgtttcggtcgtgacggcgcgcagctggcggcgctacgcccggaagtggcagaacaaaccgaaactatggaacaggcgatgcgcttgctggctccgcgtgttcagccgggcgatatggttctgctctccccagcctgtgccagccttgatcagttcaagaactttgaacaacgaggcaatgagtttgcccgtctggcgaaggagttaggttgatgcgtttatctctccctcgcctgaaaatgccgcgcctgccaggattcagtatcctggtctggatctccacggcgctaaagggctgggtgatgggctcgcgggaaaaagataccgacagcctgatcatgtacgatcgcaccttactgtggctgaccttcggcctcgcggcgattggctttatcatggtgacctcggcgtcaatgcccatagggcaacgcttaaccaacgatccgttcttcttcgcgaagcgtgatggtgtctatctgattttggcgtttattctggcgatcattacgctgcgtctgccgatggagttctggcaacgctacagtgccacgatgctgctcggatctatcatcctgctgatgatcgtcctggtagtgggtagctcggttaaaggggcatcgcgttggatcgatctcggtttgctgcgtatccagcctgcggagctgacaaaactgtcgctgttttgctatatcgccaactatctggtgcgtaaaggcgacgaagtacgtaataacctgcgcggcttcctgaaaccgatgggcgtgattctggtgttggcagtgttactgctggcacagccagaccttggtacggtggtggtgttgtttgtgactacgctggcgatgttgttcctggcgggagcgaaattgtggcagttcattgccattatcggtatgggcatttcagcggttgtgttgctgatactcgccgaaccgtaccgtatccgccgtgttaccgcattctggaacccgtgggaagatccctttggcagcggctatcagttaacgcaatcgctgatggcgtttggtcgcggcgaactttgggggcaaggtttaggtaactcggtacaaaaactggagtatctgccggaagcgcacactgactttattttcgccattatcggcgaagaactggggtatgtcggtgtggtgctggcacttttaatggtattcttcgtcgcttttcgcgcgatgtcgattggccgtaaagcattagaaattgaccaccgtttttccggttttctcgcctgttctattggcatctggtttagcttccaggcgctggttaacgtaggcgcggcggcggggatgttaccgaccaaaggtctgacattgccgctgatcagttacggtggttcgagcttactgattatgtcgacagccatcatgatgctgttgcgtattgattatgaaacgcgtctggagaaagcgcaggcgtttgtacgaggttcacgatgagtggtcaaggaaagcgattaatggtgatggcaggcggaaccggtggacatgtattcccgggactggcggttgcgcaccatctaatggctcagggttggcaagttcgctggctggggactgccgaccgtatggaagcggacttagtgccaaaacatggcatcgaaattgatttcattcgtatctctggtctgcgtggaaaaggtataaaagcactgatagctgccccgctgcgtatcttcaacgcctggcgtcaggcgcgggcgattatgaaagcgtacaaacctgacgtggtgctcggtatgggaggctacgtgtcaggtccaggtggtctggccgcgtggtcgttaggcattccggttgtacttcatgaacaaaacggtattgcgggcttaaccaataaatggctggcgaagattgccaccaaagtgatgcaggcgtttccaggtgctttccctaatgcggaagtagtgggtaacccggtgcgtaccgatgtgttggcgctgccgttgccgcagcaacgtttggctggacgtgaaggtccggttcgtgtgctggtagtgggtggttctcagggcgcacgcattcttaaccagacaatgccgcaggttgctgcgaaactgggtgattcagtcactatctggcatcagagcggcaaaggttcgcaacaatccgttgaacaggcgtatgccgaagcggggcaaccgcagcataaagtgacggaatttattgatgatatggcggcggcgtatgcgtgggcggatgtcgtcgtttgccgctccggtgcgttaacggtgagtgaaatcgccgcggcaggactaccggcgttgtttgtgccgtttcaacataaagaccgccagcaatactggaatgcgctaccgctggaaaaagcgggcgcagccaaaattatcgagcagccacagcttagcgtggatgctgtcgccaacaccctggccgggtggtcgcgagaaaccttattaaccatggcagaacgcgcccgcgctgcatccattccggatgccaccgagcgagtggcaaatgaagtgagccgggttgcccgggcgtaattgtagcgatgccttttgcatcgtatgaatttaagaagttaatggcgtaaagaatgaatacacaacaattggcaaaactgcgttccatcgtgcccgaaatgcgtcgcgttcggcacatacattttgtcggcattggtggtgccggtatgggcggtattgccgaagttctggccaatgaaggttatcagatcagtggttccgatttagcgccaaatccggtcacgcagcagttaatgaatctgggtgcgacgatttatttcaaccatcgcccggaaaacgtacgtgatgccagcgtggtcgttgtttccagcgcgatttctgccgataacccggaaattgtcgccgctcatgaagcgcgtattccggtgatccgtcgtgccgaaatgctggctgagttaatgcgttttcgtcatggcatcgccattgccggaacgcacggcaaaacgacaaccaccgcgatggtttccagcatctacgcagaagcggggctcgacccaaccttcgttaacggcgggctggtaaaagcggcgggggttcatgcgcgtttggggcatggtcggtacctgattgccgaagcagatgagagtgatgcatcgttcctgcatctgcaaccgatggtggcgattgtcaccaatatcgaagccgaccacatggatacctaccagggcgactttgagaatttaaaacagacttttattaattttctgcacaacctgccgttttacggtcgtgcggtgatgtgtgttgatgatccggtgatccgcgaattgttaccgcgagtggggcgtcagaccacgacttacggcttcagcgaagatgccgacgtgcgtgtagaagattatcagcagattggcccgcaggggcactttacgctgctgcgccaggacaaagagccgatgcgcgtcaccctgaatgcgccaggtcgtcataacgcgctgaacgccgcagctgcggttgcggttgctacggaagagggcattgacgacgaggctattttgcgggcgcttgaaagcttccaggggactggtcgccgttttgatttcctcggtgaattcccgctggagccagtgaatggtaaaagcggtacggcaatgctggtcgatgactacggccaccacccgacggaagtggacgccaccattaaagcggcgcgcgcaggctggccggataaaaacctggtaatgctgtttcagccgcaccgttttacccgtacgcgcgacctgtatgatgatttcgccaatgtgctgacgcaggttgataccctgttgatgctggaagtgtatccggctggcgaagcgccaattccgggagcggacagccgttcgctgtgtcgcacaattcgtggacgtgggaaaattgatcccattctggtgccggatccggcgcgggtagccgagatgctggcaccggtattaaccggtaacgacctgattctcgttcagggggctggtaatattggaaaaattgcccgttctttagctgaaatcaaactgaagccgcaaactccggaggaagaacaacatgactgataaaatcgcggtcctgttgggtgggacctccgctgagcgggaagtttctctgaattctggcgcagcggtgttagccggactgcgtgaaggcggtattgacgcgtatcctgtcgacccgaaagaagtcgacgtgacgcaactgaagtcgatgggctttcagaaagtgtttatcgcgctacacggtcgcggcggtgaagatggtacgctgcaggggatgctcgagctgatgggcttgccttataccggaagcggagtgatggcatctgcgctttcaatggataaactacgcagcaaacttctatggcaaggtgccggtttaccggtcgcgccgtgggtagcgttaacccgcgcagagtttgaaaaaggcctgagcgataagcagttagcagaaatttctgctctgggtttgccggttatcgttaagccgagccgcgaaggttccagtgtgggaatgtcaaaagtagtagcagaaaatgctctacaagatgcattaagattggcatttcagcacgatgaagaagtattgattgaaaaatggctaagtgggccggagttcacggttgcgatactcggtgaagaaattttaccgtcaatacgtattcaaccgtccggaaccttctatgattatgaggcgaagtatctctctgatgagacacagtatttctgccccgcaggtctggaagcgtcacaagaggccaatttgcaggcattagtgctgaaagcatggacgacgttaggttgcaaaggatggggacgtattgacgttatgctggacagcgatggacagttttatctgctggaagccaatacctcaccgggtatgaccagccacagcctggtgccgatggcggcacgtcaggcaggtatgagcttctcgcagttggtagtacgaattctggaactggcggactaatatgtcgcaggctgctctgaacacgcgaaacagcgaagaagaggtttcttctcgccgcaataatggaacgcgtctggcggggatccttttcctgctgaccgttttaacgacagtgttggtgagcggctgggtcgtgttgggctggatggaagatgcgcaacgcctgccgctctcaaagctggtgttgaccggtgaacgccattacacacgtaatgacgatatccggcagtcgatcctggcattgggtgagccgggtacctttatgacccaggatgtcaacatcatccagacgcaaatagaacaacgcctgccgtggattaagcaggtgagcgtcagaaagcagtggcctgatgaattgaagattcatctggttgaatatgtgccgattgcgcggtggaatgatcaacatatggtagacgcggaaggaaataccttcagcgtgccgccagaacgcaccagcaagcaggtgcttccaatgctgtatggcccggaaggcagcgccaatgaagtgttgcagggctatcgcgaaatggggcagatgctggcaaaggacagatttactctgaaggaagcggcgatgaccgcgcggcgttcctggcagttgacgctgaataacgatattaagctcaatcttggccggggcgatacgatgaaacgtttggctcgctttgtagaactttatccggttttacagcagcaggcgcaaaccgatggcaaacggattagctacgttgatttgcgttatgactctggagcggcagtaggctgggcgcccttgccgccagaggaatctactcagcaacaaaatcaggcacaggcagaacaacaatgatcaaggcgacggacagaaaactggtagtaggactggagattggtaccgcgaaggttgccgctttagtaggggaagttctgcccgacggtatggtcaatatcattggcgtgggcagctgcccgtcgcgtggtatggataaaggcggggtgaacgacctcgaatccgtggtcaagtgcgtacaacgcgccattgaccaggcagaattgatggcagattgtcagatctcttcggtatatctggcgctttctggtaagcacatcagctgccagaatgaaattggtatggtgcctatttctgaagaagaagtgacgcaagaagatgtggaaaacgtcgtccataccgcgaaatcggtgcgtgtgcgcgatgagcatcgtgtgctgcatgtgatcccgcaagagtatgcgattgactatcaggaagggatcaagaatccggtaggactttcgggcgtgcggatgcaggcaaaagtgcacctgatcacatgtcacaacgatatggcgaaaaacatcgtcaaagcggttgaacgttgtgggctgaaagttgaccaactgatatttgccggactggcatcaagttattcggtattgacggaagatgaacgtgaactgggtgtctgcgtcgtcgatatcggtggtggtacaatggatatcgccgtttataccggtggggcattgcgccacactaaggtaattccttatgctggcaatgtcgtgaccagtgatatcgcttacgcctttggcacgccgccaagcgacgccgaagcgattaaagttcgccacggttgtgcgctgggttccatcgttggaaaagatgagagcgtggaagtgccgagcgtaggtggtcgtccgccacggagtctgcaacgtcagacactggcagaggtgatcgagccgcgctataccgagctgctcaacctggtcaacgaagagatattgcagttgcaggaaaagcttcgccaacaaggggttaaacatcacctggcggcaggcattgtattaaccggtggcgcagcgcagatcgaaggtcttgcagcctgtgctcagcgcgtgtttcatacgcaagtgcgtatcggcgcgccgctgaacattaccggtttaacggattatgctcaggagccgtattattcgacggcggtgggattgcttcactatgggaaagagtcacatcttaacggtgaagctgaagtagaaaaacgtgttacagcatcagttggctcgtggatcaagcgactcaatagttggctgcgaaaagagttttaatttttatgaggccgacgatgattacggcctcaggcgacaggcacaaatcggagagaaactatgtttgaaccaatggaacttaccaatgacgcggtgattaaagtcatcggcgtcggcggcggcggcggtaatgctgttgaacacatggtgcgcgagcgcattgaaggtgttgaattcttcgcggtaaataccgatgcacaagcgctgcgtaaaacagcggttggacagacgattcaaatcggtagcggtatcaccaaaggactgggcgctggcgctaatccagaagttggccgcaatgcggctgatgaggatcgcgatgcattgcgtgcggcgctggaaggtgcagacatggtctttattgctgcgggtatgggtggtggtaccggtacaggtgcagcaccagtcgtcgctgaagtggcaaaagatttgggtatcctgaccgttgctgtcgtcactaagcctttcaactttgaaggcaagaagcgtatggcattcgcggagcaggggatcactgaactgtccaagcatgtggactctctgatcactatcccgaacgacaaactgctgaaagttctgggccgcggtatctccctgctggatgcgtttggcgcagcgaacgatgtactgaaaggcgctgtgcaaggtatcgctgaactgattactcgtccgggtttgatgaacgtggactttgcagacgtacgcaccgtaatgtctgagatgggctacgcaatgatgggttctggcgtggcgagcggtgaagaccgtgcggaagaagctgctgaaatggctatctcttctccgctgctggaagatatcgacctgtctggcgcgcgcggcgtgctggttaacatcacggcgggcttcgacctgcgtctggatgagttcgaaacggtaggtaacaccatccgtgcatttgcttccgacaacgcgactgtggttatcggtacttctcttgacccggatatgaatgacgagctgcgcgtaaccgttgttgcgacaggtatcggcatggacaaacgtcctgaaatcactctggtgaccaataagcaggttcagcagccagtgatggatcgctaccagcagcatgggatggctccgctgacccaggagcagaagccggttgctaaagtcgtgaatgacaatgcgccgcaaactgcgaaagagccggattatctggatatcccagcattcctgcgtaagcaagctgattaagaattgactggaatttgggtttcgaggctctttgtgctaaactggcccgccgaatgtatagtacacttcggttggataggtaatttggcgagataatacgatgatcaaacaaaggacacttaaacgtatcgttcaggcgacgggtgtcggtttacataccggcaagaaagtcaccctgacgttacgccctgcgccggccaacaccggggtcatctatcgtcgcaccgacttgaatccaccggtagatttcccggccgatgccaaatctgtgcgtgataccatgctctgtacgtgtctggtcaacgagcatgatgtacggatttcaaccgtagagcacctcaatgctgctctcgcgggcttgggcatcgataacattgttatcgaagttaacgcgccggaaatcccgatcatggacggcagcgccgctccgtttgtatacctgctgcttgacgccggtatcgacgagttgaactgcgccaaaaaatttgttcgcatcaaagagactgttcgtgtcgaagatggcgataagtgggctgaatttaagccgtacaatggtttttcgctggatttcaccatcgattttaaccatccggctattgattccagcaaccagcgctatgcgatgaacttctccgctgatgcgtttatgcgccagatcagccgtgcgcgtacgttcggtttcatgcgtgatatcgaatatctgcagtcccgtggtttgtgcctgggcggcagcttcgattgtgccatcgttgttgacgattatcgcgtactgaacgaagacggcctgcgttttgaagacgaatttgtgcgtcacaaaatgctcgatgcgatcggtgacttgttcatgtgtggtcacaatattattggtgcatttaccgcttataaatccggtcatgcactgaataacaaactgctgcaggctgtcctggcgaaacaggaagcctgggaatatgtgaccttccaggacgacgcagaactgccgttggccttcaaagcgccttcagctgtactggcataacgacatttatactgtcgtataaaattcgactggcaaatctggcactctctccggccaggtgaaccagtcgtttttttttgaattttataagagctataaaaaacggtgcgaacgctgttttcttaagcacttttccgcacaacttatcttcattcgtgctgtggactgcaggctttaatgataagatttgtgcgctaaatacgtttgaatatgatcgggatggcaataacgtgagtggaatactgacgcgctggcgacagtttggtaaacgctacttctggccgcatctcttattagggatggttgcggcgagtttaggtttgcctgcgctcagcaacgccgccgaaccaaacgcgcccgcaaaagcgacaacccgcaaccacgagccttcagccaaagttaactttggtcaattggccttgctggaagcgaacacacgccgcccgaattcgaactattccgttgattactggcatcaacatgccattcgcacggtaatccgtcatctttctttcgcaatggcaccgcaaacactgcccgttgctgaagaatctttgcctcttcaggcgcaacatcttgcattactggatacgctcagcgcgctgctgacccaggaaggcacgccgtctgaaaagggttatcgcattgattatgcgcattttaccccacaagcaaaattcagcacgcccgtctggataagccaggcgcaaggcatccgtgctggccctcaacgcctcacctaacaacaataaacctttacttcattttattaactccgcaacgcggggcgtttgagattttattatgctaatcaaattgttaactaaagttttcggtagtcgtaacgatcgcaccctgcgccggatgcgcaaagtggtcaacatcatcaatgccatggaaccggagatggaaaaactctccgacgaagaactgaaagggaaaaccgcagagtttcgtgcacgtctggaaaaaggcgaagtgctggaaaatctgatcccggaagctttcgccgtggtacgtgaggcaagtaagcgcgtctttggtatgcgtcacttcgacgttcagttactcggcggtatggttcttaacgaacgctgcatcgccgaaatgcgtaccggtgaaggaaaaaccctgaccgcaacgctgcctgcttacctgaacgcactaaccggtaaaggcgtgcacgtagttaccgtcaacgactacctggcgcaacgtgacgccgaaaacaaccgtccgctgtttgaattccttggcctgactgtcggtatcaacctgccgggcatgccagcaccggcaaagcgcgaagcttacgcagctgacatcacttacggtacgaacaacgaatacggctttgactacctgcgcgacaacatggcgttcagccctgaagaacgtgtacagcgtaaactgcactatgcgctggtggacgaagtggactccatcctgatcgatgaagcgcgtacaccgctgatcatttccggcccggcagaagacagctcggaaatgtataaacgcgtgaataaaattattccgcacctgatccgtcaggaaaaagaagactccgaaaccttccagggcgaaggccacttctcggtggacgaaaaatctcgccaggtgaacctgaccgaacgtggtctggtgctgattgaagaactgctggtgaaagagggcatcatggatgaaggggagtctctgtactctccggccaacatcatgctgatgcaccacgtaacggcggcgctgcgcgctcatgcgctgtttacccgtgacgtcgactacatcgttaaagatggtgaagttatcatcgttgacgaacacaccggtcgtaccatgcagggccgtcgctggtccgatggtctgcaccaggctgtggaagcgaaagaaggtgtgcagatccagaacgaaaaccaaacgctggcttcgatcaccttccagaactacttccgtctgtatgaaaaactggcggggatgaccggtactgctgataccgaagctttcgaatttagctcaatctacaagctggataccgtcgttgttccgaccaaccgtccaatgattcgtaaagatctgccggacctggtctacatgactgaagcggaaaaaattcaggcgatcattgaagatatcaaagaacgtactgcgaaaggccagccggtgctggtgggtactatctccatcgaaaaatcggagctggtgtcaaacgaactgaccaaagccggtattaagcacaacgtcctgaacgccaaattccacgccaacgaagcggcgattgttgctcaggcaggttatccggctgcggtgactatcgcgaccaatatggcgggtcgtggtacagatattgtgctcggtggtagctggcaggcagaagttgccgcgctggaaaatccgaccgcagagcaaattgaaaaaattaaagccgactggcaggtacgtcacgatgcggtactggaagcaggtggcctgcatatcatcggtaccgagcgtcacgaatcccgtcgtatcgataaccagttgcgcggtcgttctggtcgtcagggggatgctggttcttcccgtttctacctgtcgatggaagatgcgctgatgcgtatttttgcttccgaccgagtatccggcatgatgcgtaaactgggtatgaagccaggcgaagccattgaacacccgtgggtgactaaagcgattgccaacgcccagcgtaaagttgaaagccgtaacttcgacattcgtaagcaactgctggaatatgatgacgtggctaacgatcagcgtcgcgccatttactcccagcgtaacgaactgttggatgtcagcgatgtgagcgaaaccattaacagcattcgtgaagatgtgttcaaagcgaccattgatgcctacattccaccacagtcgctggaagaaatgtgggatattccggggctgcaggaacgtctgaagaacgatttcgacctcgatttgccaattgccgagtggctggataaagaaccagaactgcatgaagagacgctgcgtgagcgcattctggcgcagtccatcgaagtgtatcagcgtaaagaagaagtggttggtgctgagatgatgcgtcacttcgagaaaggcgtcatgctgcaaacgcttgactccctgtggaaagagcacctggcagcgatggactatctgcgtcagggtatccacctgcgtggctacgcacagaaagatccgaagcaggaatacaaacgtgaatcgttctccatgtttgcagcgatgctggagtcgttgaaatatgaagttatcagtacgctgagcaaagttcaggtacgtatgcctgaagaggttgaggagctggaacaacagcgtcgtatggaagccgagcgtttagcgcaaatgcagcagcttagccatcaggatgacgactctgcagccgcagctgcactggcggcgcaaaccggagagcgcaaagtaggacgtaacgatccttgcccgtgcggttctggtaaaaaatacaagcagtgccatggccgcctgcaataaaagctaactgttgaagtaaaaggcgcaggattctgcgccttttttataggtttaagacaatgaaaaagctgcaaattgcggtaggtattattcgcaacgagaacaatgaaatctttataacgcgtcgcgcagcagatgcgcacatggcgaataaactggagtttcccggcggtaaaattgaaatgggtgaaacgccggaacaggcggtggtgcgtgaacttcaggaagaagtcgggattaccccccaacatttttcgctatttgaaaaactggaatatgaattcccggacaggcatataacactgtggttttggctggtcgaacgctgggaaggggagccgtggggtaaagaagggcaacccggtgagtggatgtcgctggtcggtcttaatgccgatgattttccgccagccaatgaaccggtaattgcgaagcttaaacgtctgtaggtcagataaggcgttttcgccgcatccgacattcgcacacgatgcctgatgcgacgctggcgcgtcttatcaggcctaaagggatttctaactcattgataaatttgtttttgtaggtcggataaggcgttcacgccgcatccgacatttgcacaagatgcctgatgcgacgctgtccgcgtcttatcaggcctacgtgcggcatcagacaaatgtcactgctttggttcttcgctccagtcatcgctttcggaaagatcgccactgctggggattcgtttttcttcagcagcccattctccgaggtcgatcagctgacaacgtttggagcaaaatggccgaaacgggctgatttcaccccacaccaccgttttcccgcaggttgggcaattcaccgtaatagtttctgacatttttactccttagcaacaggccagttcgaaatccagacgttccggtacctgtccgttttcagtgtccagcggcataaaacgaatggcaaaacggctcttatgtccggaaatttgcggataaagctgtgaatcgagcgacagattcaggcgcagcaagtcggcatcgccaccgttatcctgataaaaaccattcaggctggtttgtttacggaagggggccgactggcgaattaaatccagcaccatggtaagtgcctgggtgagcgggttcaggctggcaatccaggtttctacctggctgtcgcgctgcgcctggggtagatgcagccaaatgtgcaatgtaggtaaatcaaagctgcaacagccgcctgggatgctcagtcgctgacgcaccagagcaatcaaacgatcttcacgcagaaattgcccgatacgcggcgcggaaattaatacgctccccgccgcttttaactgctgaattaatgcttcaatacggctctggtccacgccaggcacgccaatccaggtctggagtttacgttgctgccggtcaagttctttcaacagctcagtgcggacttcgccgcgctcgaaaacatccagtaattcactgacattacggaagaaatgcagcgcgccagcgtggtcaacgatgggtaaattaacggtgagttgctgaatcaaaaactcaatgcgcagccatgtacgcattttttcatttagtggatgttcaaaaaggacctgggtctgcattacggtttttcctgtgagacaaactgcgacgcaagctgcaaatagtgtgcgtgcaggcgggcaacatccgatgcgatagcatccggtgcgccgttattatcaatgacgtcatctgccacggcaaggcgggcttcgcgcgttgcctgagcagcaaggatttgttcgacatgctcgcgagttacatcatcgcgctgcatggtgcgcttaagttgcgtttctgggctgacatccaccacaagcactcgattcgcttttttatacagtgagttttctaccagcaatggcacaacccacagtacatagggggaagtagcttgctggatctggtgttgcgtctcttgctgaatcagcggatgcagcagggcgttaagccagtttttctcttccgggttggcgaagatccgctcgcgcaaggcccggcgctgcaatgttccatcagcagcaatcatgttagcgccaaagtgatcagcaatggcatgtagcgcaggtgcacctggttcaaccacctgacgcgcaataatatcggcatcaatgacgttaattccgagatcagcaaacgcattggcaacggtactcttgccactgccaatgcctcccgttaaggcaactatatacctcataatttatattcccgggaattcatcatgattatcaaaacgttaaaaatgagtgcacgaaagcgaaattgatgaaacgttcgctcactatttaccaggtaaatttatgggattgtagcgtaaaaaaagacaatttcgcagtcttgcgccgcattgattagtgcgtatgatagcgtcactggagttgcgctcttacccttatagccattaaccccaggaatccgcacatgcgtattgaagaagatctgaagttaggttttaaagacgttctcatccgccctaaacgctccactcttaaaagccgttccgatgttgaactggaacgtcaattcaccttcaaacattcaggtcagagctggtccggcgtgccgattatcgccgcaaatatggacaccgtaggcacattttctatggcctctgcgctggcttcttttgatattttgactgctgtgcataaacactattctgtcgaagagtggcaagcgtttatcaacaattcttccgctgatgtgctgaaacatgtgatggtttctaccggtacgtctgatgcggatttcgaaaaaactaaacagattctcgacctgaacccggcattaaacttcgtttgtattgacgtggcgaatggttattccgaacacttcgtgcagttcgttgcgaaagcgcgtgaagcgtggccgaccaaaaccatttgtgctggtaacgtagtgactggtgaaatgtgtgaggagcttatcctctcaggtgccgatatcgttaaagttggcattggcccaggttctgtttgtacaactcgcgtcaaaacaggcgtcggttatccgcaactttctgcggtaatcgaatgtgccgatgctgcgcacggtctgggcggaatgatcgtcagcgatggtggctgcaccacgccgggcgatgtggcgaaagcctttggcggcggtgccgatttcgtcatgcttggcggcatgctggcgggccacgaagagagcggcggtcgcatcgttgaggagaacggcgagaaatttatgctgttctacggcatgagctccgagtctgcgatgaaacgtcacgttggcggcgttgcggaatatcgcgcagcagaaggtaaaaccgttaagctgccgctgcgaggcccggttgaaaataccgcgcgagatattttgggcggcctgcgttcagcttgtacatacgttggggcttcacgcctgaaagagctgaccaagcgcaccacgtttattcgtgtgcaggaacaagaaaaccgcatcttcaacaacctgtaatctcccaacgctggcgtggagcaacacgccagcgttatcccatcccactcatcgcatcgcctaaatggaaaattggcagatacattgccaccaccagcgtaccaataattcctcccgttatgatcagcaacgccggttccagtaaggctgcgaggttatccgccagcgccattgtgttttcccgatgatgatgggcgaggttgtctaacatgagatccagagagccggatgcctctcctgttctcactaattgcaaacagagcgggctaaactcaccggtattttttagcgccagccagatgggttgaccgttactgatatcgtgctggatttgtgtcagaagttgcacccagtacgggcagcgcattgtttctctgacgctctctacgccctgtaaaaaagtaatgcctgcactttgtgtcagcgccagaatcgtaaagatctgcgtgagtttttgtccccgcatcagtgaacccataatcgggatgcgtaacagcaatttctgccgcactataagccaggtcggtcggcgcatcagcaacttattggctatcgccagcagaaagccgaacaacaccagcagccagctccattcgccactaaagtctgccagcgtcatgatcccctgcgttagtgccggtagtggggtgttgaaggtcttatagatagcggcaaactccggcagaacaaaatgcagcattgccacaaccaccatgattgccatcgctaaaatgatgatgggataacgtaacgctgatttcactttgtcggtcaactgacgctgggctttttgctgacgcgccagttcaaagcagcattcatccagcttaccggtcagttcacccgtgcggatcatcgcctgatagagcggcggaaatacctctgaccagggtaataaggcattggaaaaagcaatgccctgttcgagatcgtgcgccagcgattgcagcaacgcttgccattgcttactgggatgctgttccgccagcagagccagcccttcagaaagcgttaaccctgctttgagtagcgtcgccagttgatgaatgacttccgcgcttttatctcctcgccactgcgcagaattgatggcgattcgcttcaggcttagtggggtaaccatctgttgctgtagtgccataagcagtaaagtacggctctctgcccatagcatcccatcttgcgcattgccgtcgccggttatgccatgccagcgccagagttgcttactcgccatgcggcatccccagtacgcggattaactcttcaaaggtggttaagccttgctctacggccaggcagccgttttcaaaaagcgtacgcatacccgcctgtcgtgcgtgcgtttccagcgattcaacgtcggtattagcggaaataagctgacgaatgaccggcgttatgggcagaacttcaaataaggccgtacgaccataaaaaccgtggtagcaatgtacacaaccgggtgcctgccagtggggcagcggcgatggccatacattgtctggaatgtggatgggctccccttgctgccggcgacaatgtgggcaaagtttgcgtaccagacgctgggctattaccagcgtaagcgccgatgatagcatccagcgggcgacccccatttgctgtaaacgtaccagcgtttcgcaggtggaattagtgtgtagggtagacaacaccaggtgaccagtttgcgccgctttaatagcgatctctgctgtttcgccatcgcggatctctccgatcatgatgacgtcaggatcctggcgcaataacgcacgcaaaacgccctgaaaggtgagtccggcacgcggatggatttgcgtctggtttagtccggctatggggatctcaactggatcttcgacgctacaaatattaatgtcagcggtattcagcttttgcagggcactataaagcgtgaccgttttgccgctgccggtagggccagttaccagcaccagtccctgtggttgttgcaaggcatgagcaaagtccgccagttgtaacggctgcattccaagcgtgttgacatccagtgcctgacccacctgctgtaacaaccttaataccaccttttcaccaccccgacatggtaaggtcgcaatacgaaatgagacggcgtttcctgccagttcgacagtgaattgcccgtcctgcggcaggcgatgttccgcaatatccaggtttcccagcacttttaatctggcggttaatgcgactccggcatccggtgaaacatccggtaaaggatgcaatacgccgtcgatacgcaagcggatgcggtaggcattgtccgctggttcgatatgaatatcagacgcgcgttgttccagcgcagattgtaacgttcgagttagcaactctgctttgggctgatgcttctcctgaacagctacgggcaatgtctgttgtgtgcgactggcgtgaccttccatttgttggcgcgtccagcaggtgatctcaatacgtttggtggtagcgaaatgcaatgcgtccagtagctcatgcgaaggtgcatcgactaccgcaacatgaaccacctcttcgctggcatccagcaagactccatgataacgcagacacagggcagtgagctgtggaatattcattgccgctccttagttggcgtcatcaaagcggaagacatcttcgcaggcttgctgcaatgcgctgtcactttgaatattgcagttgcgcgtccagccggtgacgccgtttgcgttatcccaacccggtgtcatgacgacgcttagcccattgagactttcttgcccggtcagcgacaccacgccctttgccacactcatggctgaaacatagcgggtggtggtaggcgagggaatgccattgctgccaccgtcgcaggtatctaatccaccatgttccagcgcgcacaactctacggcggtacggtaaggcacaaaggtttgtagcatgtcggtgagtgcggctttgcgcaggtagttttgataagcgggaataccaatggcgcttaaaatggcaatgatgccaataaccaccatcagttcgataagtgtaaaaccgcgttgcttgtccatctgtttcgctccttgatttggttggcgctactttggcaaacgccatcagcacaggcgaggggcaaaaaacgaaacgggaaagcagattccgaggttttttatttcgttgcagcgaaagacaagaaatttgcgaggcgttacgaagaaagttggggaaggggagattatccgcccgcgatggagcggataaatctgtcaactattagcgaaaacgcattgaaaggtcgagtgcttgtacgtgtttagttagcgcaccgacggagataaagtccacgcccgtttcggcaaattcacgcagtgttttgtcagtgacgttgccagacacttccagtagcgccttgccgttggtgcgtttgacggcttcgcgcatctgttctgtttcgaagttatccagcatgatgatatcggctcctgctttcagggcttcatcaagttcttccagattctctacttcgacttctactggcgcatccgggtgcagccaggacgctttttcgaccgcctggcgcactgagccggaggcaataatatggttttctttgatcaggaaggcatcagaaagccccagacggtgattcgctccgccgccgcaaagtaccgcgtatttcagagctgaacgcaggccgggtaaggttttgcgcgtatccaacaactgcgtgttggtgccttccagcaattcgacatagtggcgtaccttactggcaactcctgaaagggtttgcacaaaattaagcgcagtgcgttcgcccgttaacagcacgcgggatgggccttcaagttcgaacaaggattgattggcattgatgacatcgccgtcatccacatgccagattatggtgacatcgtcgcctgccagttgaataaacacctcttcaacccagcgtttgccgcaaaagacgccattctcgcgggtgatcaccgtggcatgagagcgagaattttccggtaaaagttttgccgtaatatcattgttggcatcgactgttccgcctaaatcttcccgcagcgcctgggccaccgcgccggggatatcgagattaatgcgttccagcagctcgtcacgtcgggtgtcagggttatagcggcgaggcggcatgttaaaactccagatagctaacgaatcataaggtagaaacatgctactctgaaccgggtattagcaccacatataaggagatcctgcatgttgttagaacaggggtggctggttggcgcgcgccgcgttccctcaccacattacgattgccgcccggatgacgaaacacccaccctgctggtggtgcacaatattagcctgccgccaggcgagtttggcggtccgtggatcgacgcattattcactggaactattgatccgcaggcacatcctttctttgctgagatcgcccatttgcgcgtctccgctcactgtttgattcgccgtgatggtgaaatagtccagtatgttcctttcgataaacgtgcatggcatgcgggagtctctcagtatcaggggcgcgaacgctgcaatgatttttctattgggattgagcttgaaggcaccgatacgctggcgtataccgatgcgcagtatcaacagcttgcggcggttacgcgggcactgattgattgctatccggatatcgctaaaaacatgacgggccattgtgatattgcgccggatcggaaaaccgatcccggtcctgcatttgattgggcacggtttcgtgtgctggtcagcaaggagacaacatgacgctatttacaaccttactggtgttaattttcgagcgcctgtttaagttgggcgagcactggcagcttgatcatcgtcttgaagcgttctttcggcgggtgaaacatttttctctcgggcgcacgttaggcatgaccattattgcgatgggcgtgacttttttactgttacgcgcattgcagggagtattgttcaacgttcccacgctactggtgtggctgctgattggtttgctgtgtattggcgcaggtaaagttcgtcttcattatcatgcttatctgacagctgcttcacgtaatgatagccatgcccgtgccacgatggctggcgaactcaccatgattcacggcgtcccggcaggctgcgacgaacgtgagtatttgcgtgagctgcaaaatgcattgctgtggattaactttcgtttttatcttgcaccgctgttctggctgattgtggggggaacctggggacccgttacgctgatggggtatgcgtttttgcgtgcatggcaatactggctggcgcgatatcagacgccgcatcatcgtttacagtccggcattgatgccgtgcttcatgtactggattgggtgccggttcgtcttgcgggtgtggtatatgccttgatcggtcatggtgagaaagcgttaccggcctggtttgcttcgctgggtgatttccatacttcgcagtatcaggtgttaacgcgtctggcgcagttctctctggcgcgtgaaccgcatgtcgataaggtggagacgccgaaggcagcggtttcaatggcgaagaaaacctcgttcgtggtcgtggtggtgattgcactactgacgatttacggggcgttggtgtaaagattattgccctcaccctgtacgggtgagggcgtagagagattaatgcgcttttacggctttggcggttttctctttaaacagatagccgatacctaacacgatcagccataccgggatcaggtataccgaaatcgccattcctggggtcatcagcataatcaccagtaccgccgccataaacagcaggcagatccagttacccagcggataaagcagagcagggaagcgagttaccacgccttgttcctgcttggcgcgacggaatttcatatgcgccaggctaatcatcgcccagttgattaccagtgcagataccaccagcgccattaacagtccgaaagcggactctggggcaaggtagttaatcagtacgcacaacgccgttaccagtgcagacaccagaatggtatttactggtacaccacgtttatcgacagacgccagcgcttttggcgcattaccctgttgtgccagaccaaacagcatacggctgttgcaatatacgcagctgttgtacacggagagcgccgcagtcagtaccacgatgttcagcgcattcgccacaaaggtatcgcctaactcgtggaagatcagcacaaacggactggtatcggcggtaacgcgggtccacggcatcagtgagagcagaacggctaacgaaccaatatagaaaatcaggatgcggtagataacctggttagttgctttcggtatactttgctccgggttatcagcttctgctgcggtgatccccaccagttccagaccaccgaacgagaacatgataatcgccatcatcatcaccagcccggtgaagccgtgcggcaggaaaccaccctgatcccacaggttgctaacggtcgcctgcgggccgccgttgccactgaatagcagccagccgccgaagatgatcatcgctaccaccgcgataactttgataatggcaaaccagaactccatctcgccaaacactttaacgttggtcaggttgatggcgttaatcaccacaaagaatacggcggcagaaacccaggtggggatttccggataccagaactgaatgtatttacccacggcagtcagctcagccatggcaactaaaacgtacagtacccagtagttccagccagaggcgaaaccggcaaaactgccccagtatttataagcaaagtggctaaaggagcctgcgacaggttcttcgaccaccatttcacccagctgacgcatgatcagaaaggcgataaaaccagcaatggcgtaacccaggataatccctggccctgcggactgtattacggaggcgctacccaggaataacccggtccctatcgcgccacccagcgcgataagctgaatatggcggtttttaaggccgcgctttagctgctcgccgtgctgttgaccttccatcatgaaacctcgtgcggtggttgtttttttgatctacgcagtgatgcgtgtgtaagtttgcaattccgtttgttgtattaatttgtttacatcaaagaagtttgaattgttacaaaaagacttccgtcagatcaagaataatggtatgcggcagcgaatgcacccgctttatgcatggttgaagatgagttgcttaaaaagaaaccgtttgtaaagctcagcctcaacccctctcaatatgtagaatgaatttaaattcgttttaattgaattaaaaatcacaaaattggtaagtgaatcggttcaattcggatttttatagtttaataatcgttaaaaaactcctttcctacgtaaagtctacatttgtgcatagttacaactttgaaacgttatatatgtcaagttgttaaaatgtgcacagtttcatgatttcaatcaaaacctgtatggacataaggtgaatactttgttactttagcgtcacagacatgaaattggtaagaccaattgacttcggcaagtggcttaagacaggaactcatggcctacagcaaaatccgccaaccaaaactctccgatgtgattgagcagcaactggagtttttgatcctcgaaggcactctccgcccgggcgaaaaactcccaccggaacgcgaactggcaaaacagtttgacgtctcccgtccctccttgcgtgaggcgattcaacgtctcgaagcgaagggcttgttgcttcgtcgccagggtggcggcacttttgtccagagcagcctatggcaaagcttcagcgatccgctggtggagctgctctccgaccatcctgagtcacagtatgacttgctcgaaacacgacacgccctggaaggtatcgccgcttattacgccgcgctgcgtagtaccgatgaagacaaggaacgcatccgtgaactccaccacgccatagagctggcgcagcagtctggcgatctggacgcggaatcaaacgccgtactccagtatcagattgccgtcaccgaagcggcccacaatgtggttctgcttcatctgctaaggtgtatggagccgatgttggcccagaatgtccgccagaacttcgaattgctctattcgcgtcgcgagatgctgccgctggtgagtagtcaccgcacccgcatatttgaagcgattatggccggtaagccggaagaagcgcgcgaagcatcgcatcgccatctggcctttatcgaagaaattttgctcgacagaagtcgtgaagagagccgccgtgagcgttctctgcgtcgtctggagcaacgaaagaattagtgatttttctggtaaaaattatccagaagatgttgtaaatcaagcgcatataaaagcgcggcaactaaacgtagaacctgtcttattgagctttccggcgagagttcaatgggacaggttccagaaaactcaacgttattagatagataaggaataacccatgtcagaacgtttcccaaatgacgtggatccgatcgaaactcgcgactggctccaggcgatcgaatcggtcatccgtgaagaaggtgttgagcgtgctcagtatctgatcgaccaactgcttgctgaagcccgcaaaggcggtgtaaacgtagccgcaggcacaggtatcagcaactacatcaacaccatccccgttgaagaacaaccggagtatccgggtaatctggaactggaacgccgtattcgttcagctatccgctggaacgccatcatgacggtgctgcgtgcgtcgaaaaaagacctcgaactgggcggccatatggcgtccttccagtcttccgcaaccatttatgatgtgtgctttaaccacttcttccgtgcacgcaacgagcaggatggcggcgacctggtttacttccagggccacatctccccgggcgtgtacgctcgtgctttcctggaaggtcgtctgactcaggagcagctggataacttccgtcaggaagttcacggcaatggcctctcttcctatccgcacccgaaactgatgccggaattctggcagttcccgaccgtatctatgggtctgggtccgattggtgctatttaccaggctaaattcctgaaatatctggaacaccgtggcctgaaagatacctctaaacaaaccgtttacgcgttcctcggtgacggtgaaatggacgaaccggaatccaaaggtgcgatcaccatcgctacccgtgaaaaactggataacctggtcttcgttatcaactgtaacctgcagcgtcttgacggcccggtcaccggtaacggcaagatcatcaacgaactggaaggcatcttcgaaggtgctggctggaacgtgatcaaagtgatgtggggtagccgttgggatgaactgctgcgtaaggataccagcggtaaactgatccagctgatgaacgaaaccgttgacggcgactaccagaccttcaaatcgaaagatggtgcgtacgttcgtgaacacttcttcggtaaatatcctgaaaccgcagcactggttgcagactggactgacgagcagatctgggcactgaaccgtggtggtcacgatccgaagaaaatctacgctgcattcaagaaagcgcaggaaaccaaaggcaaagcgacagtaatccttgctcataccattaaaggttacggcatgggcgacgcggctgaaggtaaaaacatcgcgcaccaggttaagaaaatgaacatggacggtgtgcgtcatatccgcgaccgtttcaatgtgccggtgtctgatgcagatatcgaaaaactgccgtacatcaccttcccggaaggttctgaagagcatacctatctgcacgctcagcgtcagaaactgcacggttatctgccaagccgtcagccgaacttcaccgagaagcttgagctgccgagcctgcaagacttcggcgcgctgttggaagagcagagcaaagagatctctaccactatcgctttcgttcgtgctctgaacgtgatgctgaagaacaagtcgatcaaagatcgtctggtaccgatcatcgccgacgaagcgcgtactttcggtatggaaggtctgttccgtcagattggtatttacagcccgaacggtcagcagtacaccccgcaggaccgcgagcaggttgcttactataaagaagacgagaaaggtcagattctgcaggaagggatcaacgagctgggcgcaggttgttcctggctggcagcggcgacctcttacagcaccaacaatctgccgatgatcccgttctacatctattactcgatgttcggcttccagcgtattggcgatctgtgctgggcggctggcgaccagcaagcgcgtggcttcctgatcggcggtacttccggtcgtaccaccctgaacggcgaaggtctgcagcacgaagatggtcacagccacattcagtcgctgactatcccgaactgtatctcttacgacccggcttacgcttacgaagttgctgtcatcatgcatgacggtctggagcgtatgtacggtgaaaaacaagagaacgtttactactacatcactacgctgaacgaaaactaccacatgccggcaatgccggaaggtgctgaggaaggtatccgtaaaggtatctacaaactcgaaactattgaaggtagcaaaggtaaagttcagctgctcggctccggttctatcctgcgtcacgtccgtgaagcagctgagatcctggcgaaagattacggcgtaggttctgacgtttatagcgtgacctccttcaccgagctggcgcgtgatggtcaggattgtgaacgctggaacatgctgcacccgctggaaactccgcgcgttccgtatatcgctcaggtgatgaacgacgctccggcagtggcatctaccgactatatgaaactgttcgctgagcaggtccgtacttacgtaccggctgacgactaccgcgtactgggtactgatggcttcggtcgttccgacagccgtgagaacctgcgtcaccacttcgaagttgatgcttcttatgtcgtggttgcggcgctgggcgaactggctaaacgtggcgaaatcgataagaaagtggttgctgacgcaatcgccaaattcaacatcgatgcagataaagttaacccgcgtctggcgtaagaggtaaaagaataatggctatcgaaatcaaagtaccggacatcggggctgatgaagttgaaatcaccgagatcctggtcaaagtgggcgacaaagttgaagccgaacagtcgctgatcaccgtagaaggcgacaaagcctctatggaagttccgtctccgcaggcgggtatcgttaaagagatcaaagtctctgttggcgataaaacccagaccggcgcactgattatgattttcgattccgccgacggtgcagcagacgctgcacctgctcaggcagaagagaagaaagaagcagctccggcagcagcaccagcggctgcggcggcaaaagacgttaacgttccggatatcggcagcgacgaagttgaagtgaccgaaatcctggtgaaagttggcgataaagttgaagctgaacagtcgctgatcaccgtagaaggcgacaaggcttctatggaagttccggctccgtttgctggcaccgtgaaagagatcaaagtgaacgtgggtgacaaagtgtctaccggctcgctgattatggtcttcgaagtcgcgggtgaagcaggcgcggcagctccggccgctaaacaggaagcagctccggcagcggcccctgcaccagcggctggcgtgaaagaagttaacgttccggatatcggcggtgacgaagttgaagtgactgaagtgatggtgaaagtgggcgacaaagttgccgctgaacagtcactgatcaccgtagaaggcgacaaagcttctatggaagttccggcgccgtttgcaggcgtcgtgaaggaactgaaagtcaacgttggcgataaagtgaaaactggctcgctgattatgatcttcgaagttgaaggcgcagcgcctgcggcagctcctgcgaaacaggaagcggcagcgccggcaccggcagcaaaagctgaagccccggcagcagcaccagctgcgaaagcggaaggcaaatctgaatttgctgaaaacgacgcttatgttcacgcgactccgctgatccgccgtctggcacgcgagtttggtgttaaccttgcgaaagtgaagggcactggccgtaaaggtcgtatcctgcgcgaagacgttcaggcttacgtgaaagaagctatcaaacgtgcagaagcagctccggcagcgactggcggtggtatccctggcatgctgccgtggccgaaggtggacttcagcaagtttggtgaaatcgaagaagtggaactgggccgcatccagaaaatctctggtgcgaacctgagccgtaactgggtaatgatcccgcatgttactcacttcgacaaaaccgatatcaccgagttggaagcgttccgtaaacagcagaacgaagaagcggcgaaacgtaagctggatgtgaagatcaccccggttgtcttcatcatgaaagccgttgctgcagctcttgagcagatgcctcgcttcaatagttcgctgtcggaagacggtcagcgtctgaccctgaagaaatacatcaacatcggtgtggcggtggataccccgaacggtctggttgttccggtattcaaagacgtcaacaagaaaggcatcatcgagctgtctcgcgagctgatgactatttctaagaaagcgcgtgacggtaagctgactgcgggcgaaatgcagggcggttgcttcaccatctccagcatcggcggcctgggtactacccacttcgcgccgattgtgaacgcgccggaagtggctatcctcggcgtttccaagtccgcgatggagccggtgtggaatggtaaagagttcgtgccgcgtctgatgctgccgatttctctctccttcgaccaccgcgtgatcgacggtgctgatggtgcccgtttcattaccatcattaacaacacgctgtctgacattcgccgtctggtgatgtaagtaaaagagccggcccaacggccggcttttttctggtaatctcatgaatgtattgaggttattagcgaatagacaaatcggttgccgtttgttgtttaaaaattgttaacaattttgtaaaataccgacggatagaacgacccggtggtggttagggtattacttcacataccctatggatttctgggtgcagcaaggtagcaagcgccagaatccccaggagcttacataagtaagtgactggggtgagggcgtgaagctaacgccgctgcggcctgaaagacgacgggtatgaccgccggagataaatatatagaggtcatgatgagtactgaaatcaaaactcaggtcgtggtacttggggcaggccccgcaggttactccgctgccttccgttgcgctgatttaggtctggaaaccgtaatcgtagaacgttacaacacccttggcggtgtttgcctgaacgtcggctgtatcccttctaaagcactgctgcacgtagcaaaagttatcgaagaagccaaagcgctggctgaacacggtatcgtcttcggcgaaccgaaaaccgatatcgacaagattcgtacctggaaagagaaagtgatcaatcagctgaccggtggtctggctggtatggcgaaaggccgcaaagtcaaagtggtcaacggtctgggtaaattcaccggggctaacaccctggaagttgaaggtgagaacggcaaaaccgtgatcaacttcgacaacgcgatcattgcagcgggttctcgcccgatccaactgccgtttattccgcatgaagatccgcgtatctgggactccactgacgcgctggaactgaaagaagtaccagaacgcctgctggtaatgggtggcggtatcatcggtctggaaatgggcaccgtttaccacgcgctgggttcacagattgacgtggttgaaatgttcgaccaggttatcccggcagctgacaaagacatcgttaaagtcttcaccaagcgtatcagcaagaaattcaacctgatgctggaaaccaaagttaccgccgttgaagcgaaagaagacggcatttatgtgacgatggaaggcaaaaaagcacccgctgaaccgcagcgttacgacgccgtgctggtagcgattggtcgtgtgccgaacggtaaaaacctcgacgcaggcaaagcaggcgtggaagttgacgaccgtggtttcatccgcgttgacaaacagctgcgtaccaacgtaccgcacatctttgctatcggcgatatcgtcggtcaaccgatgctggcacacaaaggtgttcacgaaggtcacgttgccgctgaagttatcgccggtaagaaacactacttcgatccgaaagttatcccgtccatcgcctataccgaaccagaagttgcatgggtgggtctgactgagaaagaagcgaaagagaaaggcatcagctatgaaaccgccaccttcccgtgggctgcttctggtcgtgctatcgcttccgactgcgcagacggtatgaccaagctgattttcgacaaagaatctcaccgtgtgatcggtggtgcgattgtcggtactaacggcggcgagctgctgggtgaaatcggcctggcaatcgaaatgggttgtgatgctgaagacatcgcactgaccatccacgcgcacccgactctgcacgagtctgtgggcctggcggcagaagtgttcgaaggtagcattaccgacctgccgaacccgaaagcgaagaagaagtaatttttcgtttgccggaacatccggcaattaaaaaagcggctaaccacgccgctttttttacgtctgcaatttacctttccagtcttcttgctccacgttcagagagacgttcgcatactgctgaccgttgctcgttattcagcctgacagtatggttactgtcgtttagacgttgtgggcggctctcctgaactttctcccgaaaaacctgacgttgttcaggtgatgccgattgaacacgctggcgggcgttatcacgttgctgttgattcagtgggcgctgctgtactttttccttaaacacctggcgctgctctggtgatgcggactgaatacgctcacgcgctgcgtctcttcgctgctggttctgcgggttagtctgcattttctcgcgaaccgcctggcgctgctcaggcgaggcggactgaatgcgctcacgcgctgcctctcttcgctgctggatcttcgggttagtctgcattctctcgcgaactgcctggcgctgctcaggcgaggcggactgataacgctgacgagcggcgtccttttgttgctgggtcagtggttggcgacggctgaagtcgtggaagtcgtcatagctcccatagtgttcagcttcattaaaccgctgtgccgctgcctgacgttgggtatctcgtgtaatgactggtgcggcgtgtgttcgttgctgaaactgatttgctgccgcctgacgctggctgtcgcgcgttggggcaggtaattgcgtggcgctcattccgccgttgacatcggtttgatgaaaccgctttgccatatcctgatcatgatagggcacaccattacggtagtttggattgtgccgccatgccatattcttatcagtaagatgctcaccggtgatacggttgaaattgttgacgtcgatattgatgttgtcgccgttgtgttgccagccattaccgtcacgatgaccgccatcgtggtgatgataatcatcattgtcatgatgatgatggtcatgatcgtcgtcgtcccagtcgatgctgctgaatagtgcgtacgtggtagcaacgcccatgctatagccgaatccgcgtacaaagctgtcaacaaacggttctccggctggtggtggcagataaaccggcggatacgcagtattggcccagttcccgtaaaccacggttgggttgtagttgggaatatagaccacatcaggattggcgggctcaatggaaatgacggttgttgccggctctgtaatgacggggttggcagttaaaactgtattggatggtatgacgggtgccgtgactgtctgttttaccggtacagctttcttcgttgtggtaataactttctgttcggttgatgacttcagcgagccggtttgttgcgccagttgccgcaatcgctgtaccgagtccatcacgtcctgcggctgggccagaaaagcatcgcccaggttttgcacccattgcgggttttcgcccatcaatgccatcaattgtggaaaggccaccagtgatttaacgctggcgtcccacggctggtcagataccgcctgaatagcagcatcgccttgtttaagtggattatcgtgcgaccattgcactgcttgagcaacgtttgtcggataggttgatgccatcagcacctgcgaaagtagggcgtcgggatacagcgcgacgggcgcgacccattgatctatttgtgcagtgctgaatgcggatttgacgacggcgggtgttacgggaggtgcggaaaccgttgcaggaaacgtaaccgcggcagcgtcagacacagccagttgtgtcgattgcggttccacaggcgcttccactgtgcggctttttatatatagcccggtagaggcggcacaaagcccggcactgcaaattagcgccagcacatggggtttaaacggcaaagtcattttcataattcggatctcaaggaaatcgcaatggtcggcgaactgccacccgcaggtgctgtgaatccgagtataaagaggcggtagtttaaattttgactaatcttgggattcgttgagaaaggtgattatcaccatgcgaattaacgaagtttttacggagggaaacaatctctagaccatccttaacgattcagccacttttttatgttgcttttttgtaaacagattaacacctcgtcaaaatcctgctattctgcccgttgcggtactgggcatttaccctacaaactgctgtctcacaggagcgtgaagagaatcgcctgccgcactatgacaatgagagcgaggagaaccgtcgtgctagaagaataccgtaagcacgtagctgagcgtgccgctgaggggattgcgcccaaacccctggatgcaaaccaaatggccgcacttgtagagctgctgaaaaacccgcccgcgggcgaagaagaattcctgttagatctgttaaccaaccgtgttcccccaggcgtcgatgaagccgcctatgtcaaagcaggcttcctggctgctatcgcgaaaggcgaagccaaatcccctctgctgactccggaaaaagccatcgaactgctgggcaccatgcagggtggttacaacattcatccgctgatcgacgcgctggatgatgccaaactggcacctattgctgccaaagcactttctcacacgctgctgatgttcgataacttctatgacgtagaagagaaagcgaaagcaggcaacgaatatgcgaagcaggttatgcagtcctgggcggatgccgaatggttcctgaatcgcccggcgctggctgaaaaactgaccgttactgtcttcaaagtcactggcgaaactaacaccgatgacctttctccggcaccggatgcgtggtcacgcccggatatcccactgcacgcgctggcgatgctgaaaaacgcccgtgaaggtattgagccagaccagcctggtgttgttggtccgatcaagcaaatcgaagctctgcaacagaaaggtttcccgctggcgtacgtcggtgacgttgtgggtacgggttcttcgcgtaaatccgccactaactccgttctgtggtttatgggcgatgatattccacatgtgccgaacaaacgcggcggtggtttgtgcctcggcggtaaaattgcacccatcttctttaacacgatggaagacgcgggtgcactgccaatcgaagtcgacgtctctaacctgaacatgggcgacgtgattgacgtttacccgtacaaaggtgaagtgcgtaaccacgaaaccggcgaactgctggcgaccttcgaactgaaaaccgacgtgctgattgatgaagtgcgtgctggtggccgtattccgctgattatcgggcgtggcctgaccaccaaagcgcgtgaagcacttggtctgccgcacagtgatgtgttccgtcaggcgaaagatgtcgctgagagcgatcgcggcttctcgctggcgcaaaaaatggtaggccgtgcctgtggcgtgaaaggcattcgtccgggcgcgtactgtgaaccgaaaatgacttctgtaggttcccaggacaccaccggcccgatgacccgtgatgaactgaaagacctggcgtgcctgggcttctcggctgacctggtgatgcagtctttctgccacaccgcggcgtatccgaagccagttgacgtgaacacgcaccacacgctgccggacttcattatgaaccgtggcggtgtgtcgctgcgtccgggtgacggcgtcattcactcctggctgaaccgtatgctgctgccggataccgtcggtaccggtggtgactcccatacccgtttcccgatcggtatctctttcccggcgggttctggtctggtggcgtttgctgccgcaactggcgtaatgccgcttgatatgccggaatccgttctggtgcgcttcaaaggcaaaatgcagccgggcatcaccctgcgcgatctggtacacgctattccgctgtatgcgatcaaacaaggtctgctgaccgttgagaagaaaggcaagaaaaacatcttctctggccgcatcctggaaattgaaggtctgccggatctgaaagttgagcaggcctttgagctaaccgatgcgtccgccgagcgttctgccgctggttgtaccatcaagctgaacaaagaaccgatcatcgaatacctgaactctaacatcgtcctgctgaagtggatgatcgcggaaggttacggcgatcgtcgtaccctggaacgtcgtattcagggcatggaaaaatggctggcgaatcctgagctgctggaagccgatgcagatgcggaatacgcggcagtgatcgacatcgatctggcggatattaaagagccaatcctgtgtgctccgaacgacccggatgacgcgcgtccgctgtctgcggtacagggtgagaagatcgacgaagtgtttatcggttcctgcatgaccaacatcggtcacttccgtgctgcgggtaaactgctggatgcgcataaaggtcagttgccgacccgcctgtgggtggcaccgccaacccgtatggacgccgcacagttgaccgaagaaggctactacagcgtcttcggtaagagtggtgcgcgtatcgagatccctggctgttccctgtgtatgggtaaccaggcgcgtgtggcggacggtgcaacggtggtttccacctctacccgtaacttcccgaaccgtctgggtactggcgcgaatgtcttcctggcttctgcggaactggcggctgttgcggcgctgattggcaaactgccgacgccggaagagtaccagacctacgtggcgcaggtagataaaacagccgttgatacttaccgttatctgaacttcaaccagctttctcagtacaccgagaaagccgatggggtgattttccagactgcggtttaaaaagtcagcgcacgcgctgcgcataaacgacacaatgcccggtgaatgagattcccgggcatttttttatttctaaaccatcgccgttccgctgtttttctccggtaaggctgcgataattacatcaatggcgcaatgcgatttcggtgcattgccgggagcagaggaacacactatggattacgaatttctgcgcgatattaccggagtggtaaaggtgcgtatgtccatggggcatgaagtggtcgggcactggtttaatgaagaggtgaaagaaaacctggccttgcttgatgaagtggaacaagcagcgcacgcactgaaaggtagcgaacggtcctggcaacgggcagggcatgaatacaccctgtggatggacggtgaagaggtgatggttcgcgccaatcaactggaattcgctggcgatgaaatggaagaggggatgaactactacgacgaagaaagcctgtcgctatgcggcgttgaggattttctgcaggtcgtggcggcttaccgcaatttcgtgcagcagaagtaaataaatctggcggagcctgggagctccgccagagccgttaaacagctggcatattgcgcccgtaataaatctcgcgcatttctttccacagcgcagcggtaatttcctggcgctcgctgtcggttaagtcttccggtttggtgtggaacatgtagtgcttaaggtcgaactctttaagcaacatcttggtatggaagatattttcctgatagacgttcacatccaccatgtcatacagcgccttcatatcgtcagacataaagttctgaatcgaattaatctcatggtcgataaagtgcttcataccgttaatgtcgcgggtaaaaccgcgcacgcgataatcaatggttacgatatcggactcaagctggtggatcaggtaattcagcgccttcagcggagaaatcacgccgcaggtagagacttcaatatcggcgcggaaggtacataaaccgccttcaggatgactttccgggtaggtatgtacgcaaatatgacttttatcaagatgggcaacgaccgtttctggcagtgggccggggtgttctgttttgtcgatgagtttcgggtcaaccggttcttcactcaccagaatagtgacgctggcaccctgtggttcgtaatcctggcgggcgatgttaagaatattagccccgataatggaacaggtttctgacaggatttcggtcagacggttggcattatagagttcatcgatataagcaatataaccgtcgcgctcttcggcagttttggcgtagcagatatcgtaaatacaaaaactcagacttttggtcagattattaaagccatgcagtttcagttttttcaatttcttatcttctccttaggacggctgtgaagccagtgcgtcttgcagatactgaggtaaggcaaaagctgccgtatggattgccggattgtaataacggcatttcaggccagaggcgagaaaacgcgcctgaataatttcggttgagagatggcgtaaggcgtcgttatctgtcgcccatgcaaaagtcatgataccgccgtaataggtcgggatcgccgcctgataaaagccaacgtcgctgaagtaatggctgagtttgcgatggctgtcgatggcttcttcctgctgtaaaaagcagacgccgttttgtgcgacgaagataccgccaggattcaggcaacgtttgcagccttcataaaatgccgaagtgaaaaggctttcgccgggaccgataggatcggtgcagtcggagataatgacatcaaaggtctggctggtttgattaacgaaattgacgccatcgtcgatcaccagcttaaagcgcggatcgtcgtagctaccggcgttatggttgggtagatactgacggcagaacgatacgacacccgcatcgatttccaccatcgtgattgactcaacgtttttatgtcgggttacttcacgcagcatggcaccgtcgccgccgccgataatcagcacatgtttcgcgtgaccatgggccagtagcggaacatgggtcatcatctcatgatagataaactcgtcgcgctcggtggtttgtactacgccatccagcgccattacgcgaccaaatgcagcgttctcaaaaatgatcagatcctggtgatcggtcttttcatgatacagaacgttatctaccgcaaagtactgcccaaactggtcgtgtagcgtttcatgccactgttttttttcggccatgggttgatacctcctttgttaacacccgtaaaaaaagggcgcaacataatagctaacattgaccgcggatgcacggtcaatatttctacaaaaaggtatcagggattatttgacgtaggcaagcaggcttaaggaatcgcgggccagggctttgcattttttagcgacgggaatgccaatgccgctgagatcgcggtagctgtcttcaccgagggctttcatgtcgaaggtgtcgtaattactgaggtcccactggttttgctgagcgaaaaagaccagtgcgcgacgaatttgcccgttaggtaagttctggtaaccacaatcgttcttcagaaagacaaaaactgccgttaaatcggccatatcttcggcttcagactcgctgagcgcgtaactgtttgcgcagacggccatcaggctgccgaataacactgttctgaaaaacgtcttcattgcttctaccaggggcttaaagaagataaacgttagcacactgcgagcgaggcgacgaccattattgtcgattaaattgtgtctgcggcttgaccttcccgtaaggggaaggactatgctcaacgtttgattttgtttcgcctgcttaagaataaggaaataactatgcaacgtcgtgatttcttaaaatattccgtcgcgctgggtgtggcttcggctttgccgctgtggagccgcgcagtatttgcggcagaacgcccaacgttaccgatccctgatttgctcacgaccgatgcccgtaatcgcattcagttaactattggcgcaggccagtccacctttggcgggaaaactgcaactacctggggctataacggcaatctgctggggccggcggtgaaattacagcgcggcaaagcggtaacggttgatatctacaaccaactgacggaagagacaacgttgcactggcacgggctggaagtaccgggtgaagtcgacggcggcccgcagggaattattccgccaggtggcaagcgctcggtgacgttgaacgttgatcaacctgccgctacctgctggttccatccgcatcagcacggcaaaaccgggcgacaggtggcgatggggctggctgggctggtggtgattgaagatgacgagatcctgaaattaatgctgccaaaacagtggggtatcgatgatgttccggtgatcgttcaggataagaaatttagcgccgacgggcagattgattatcaactggatgtgatgaccgccgccgtgggctggtttggcgatacgttgctgaccaacggtgcaatctacccgcaacacgctgccccgcgtggttggctgcgcctgcgtttgctcaatggctgtaatgcccgttcgctcaatttcgccaccagcgacaatcgcccgctgtatgtgattgccagcgacggtggtctgctacctgaaccagtgaaggtgagcgaactgccggtgctgatgggcgagcgttttgaagtgctggtggaggttaacgataacaaaccctttgacctggtgacgctgccggtcagccagatggggatggcgattgcgccgtttgataagcctcatccggtaatgcggattcagccgattgctattagtgcctccggtgctttgccagacacattaagtagcctgcctgcgttaccttcgctggaagggctgacggtacgcaagctgcaactctctatggacccgatgctcgatatgatggggatgcagatgctaatggagaaatatggcgatcaggcgatggccgggatggatcacagccagatgatgggccatatggggcacggcaatatgaatcatatgaaccacggcgggaagttcgatttccaccatgccaacaaaatcaacggtcaggcgtttgatatgaacaagccgatgtttgcggcggcgaaagggcaatacgaacgttgggttatctctggcgtgggcgacatgatgctgcatccgttccatatccacggcacgcagttccgtatcttgtcagaaaatggcaaaccgccagcggctcatcgcgcgggctggaaagataccgttaaggtagaaggtaatgtcagcgaagtgctggtgaagtttaatcacgatgcaccgaaagaacatgcttatatggcgcactgccatctgctggagcatgaagatacggggatgatgttagggtttacggtataaaaagaccgtattcggaaatatgcccggatctctccgggcattaaactgatgacaaacgcaaatctgcctgatgcgctacgcttatcaggcctacgctagctgtgcaatccattgattttgcacaattttgtaggctggataaggcgttcacgccgcatccggcatgaacaacgcgcacgttgtcagcaatctgagcaagtcttacttcacatcatccggcagcgcataagccacaatatagtcgcccatcttcgtaccaaatgaaccgtgaccgcctgcggagatcaccacatactgcttaccattcacttcataggtcattggcgtagcctgaccacccgctggtaaacgaccctgccacagtttttcaccgttgctcatgttgtaagcgcgcaggtagttatctgccgtagcggcgataaacagcacgttacccgccgtggagattggcccgcccagcatcggcatacccatattgaacggcaccggaaccggcatcgggaacggcatactgtcctgcggcgtaccaatacgtttcttccacaccacttcattagttttcagatccagcgccgagatataaccccatgctggctgtttacatggcagaccaaatggtgagaggaacgggttgagcgtgacaccatacggtacaccgtactgtggctgaatgccggattccgtacccgtgcctttggcatctttcggctgctccatcgggttgccaggaccacgcgggatcagtttcgaaacaaacggcagtgccattgggttggcaatcgccacttcacgatttggatcaacggaaatcccgccccattcgaacatccccaggttacccgggaagaccagcgtaccctgttcagatggcggggtgaaaatgccttcatagcgcatctggtggaacatcacgcggcacaccagttggtcaaacatggtggctccccacatatccgcaccgctcaaatctttcgtcggacggaagctcagttcagaaaacggttgagttggggttacgtaatcgcctttcgctgcaccttggggaaccggtttttccggtgccggaaccaccagttcgccattacgacgatcgagcacaaaaatgttgccggttttcgccggagcgtaaataactggcactttctgaccattaacggtgatgtccgccagcgtcggctgtgccggaagatccatgtcccacaggtcgtggtgaacggtctggtagctccacgccagtttcccggtagtggcattcagcgccagaatcgagctggcataacgttcctgttccggtgtgcggttaccgccccagatatccggcgtggtcacgcccatcggcagatagaccagatccagcttcgcgtcataggccgctggtgcccaggagtttggcgagttaaaggtaaaggtgtgttcgtcagacgggattgcgttcggatctttcgcgccgggatcaaaagcccacagcagctccccggtgttgacatcaaaaccacggatcacgccagacgtttcgcgggttgagaagttatcggtaactgaaccggccatcacgatggttttatcggtgataatcggtggcgaagtcggttcatacagacccggtttggtgtctggcatattgctttgcagattgagcacgcctttattggcgaaggtttcgcacagtttgccgttttcagcgttaatcgcaatcagtcgaccatcattgaccggaagaatgatacgacgcgggcaatccgccatcacttccggcgaagcggtttctgctttggcttcatgataagagacaccacggcaggttacgtgctggaaagactcgttggttttcagctcaggatcgtaatgccatttctctttgccgctggcggcatcaagcgcaaacaggcgctggtgagcggtacacaggtaaagggtgtcgcccactttaatcggcgtcacttcattggtgatttcacccggatcgttcggctgcttcacatcgccagtacggaacacccaggcttctttcagattatggacgttatcggcgttaatttgtttcagcggcgaaaagcgttgaccttcctgattacgaccataggcaggccagtcctgatcggctacgggggagatagcttcagcaggtgtggcatcggcgcttaaggtgccgttgatctcctgcggatcgttaaatccggcccaggtcaggataccaccgctaatcagcagtgcgaccaccagtgcggcaactgcgccgctggcaggaatgaccaggcgacgccagacaaacggcaggatcagccagatgccgaagaagaccagaatgtcgctgcgcggagtcagcgcccagaagtcgaaaccaacttcccagacgccccaaatcatggtgccgagcagcagggctgcgtatagccaaagcgcggcgcgtttactgcgccacagcatccaggcgacgccgagcatcacaaggccagcgatagggtagtaccaggagccgccaatcgcgaccagccagcctccgccaatgagtagatacagcccgcaaagcgctgcaaaaagggctgttagcgtgacgagtaatcgtcgcgagcctgtattgttaattgccataaagagacaccatttcaattcattaatattttagtagcaattaattataggttttaacatgtgtgatcgtcatcacaattcgagctttattaacagattccgcgaatgaatagttttactggtatactgcgtgtcttgcgctttgttgcggtgccaaaacctgcccgtgcgaagtgatttgtttttaaatcatatggttagagatatgaaacatactgtagaagtaatgatccccgaagcggagattaaagcgcgtatcgccgaactgggtcgtcagattactgagcgttacaaagacagcggcagcgatatggtgctggtgggtctgctgcgtggctcatttatgtttatggcggacctgtgccgtgaagttcaggtatctcatgaagtcgactttatgaccgcctccagctacggtagcggcatgtccaccacccgtgatgtgaaaatcctcaaagatctggatgaagatatccgtggcaaggacgtgctgattgttgaagatatcatcgactcggggaatacactgtcgaaagtgcgtgagatcttaagcctgcgcgaaccgaagtcgctggcgatttgtacgctgctggataaaccgtcccgtcgtgaagtgaacgtcccggtagaatttatcggtttctcgatcccggatgagtttgtggtgggttacggcattgattacgcacagcgttaccgtcatctgccgtatatcggcaaagtgattctgctggacgagtaagtgtgaagttgccggatgtgttgcatccggcatggcatttttatttgtggttggcgtgtttcagcttgaggttggaaatcccgtgacggtaacgttgctcaagggtttcgcggttggtggcggtaacatccagatcacgcagcaagccgtcgtgaatgccgtaggcccagccgtgaatggtaactttctgcccgcgtttccacgctgattgcataatggtggagtggcccaggttatacacctgttccatgacgttcagttcacacaaggtatccagacggcgctcttgcggcatttcgccgagcaatgagctatgtttgaaccagatatcgcggatatgcagcagccagttgttgataagccccagttccgggttttcaactgcggcttgtacgccgccgcaaccgtagtggccacagataataatgtgttcaacttcgagtacatccactgcatactgaaccacggaaaggcagttcaggtcagtgtgaatgaccaggttagcaacattacggtgaacaaagagttcgcccggctcaagaccggttaaacgttctgcaggaacgcgactgtcggaacatccaatccatagaaagcgcggtttttgcgcttgtgccagtttctcaaaaaacccgggatcctcttccaccagcatttttgaccatagtgcattgttgctgatgagtgtatctatgtctttcatggaggttaacgacctgtaaccaaataattacgtttggctaatatagggcaactccgggacgatttaaaccacagataaagtgtaagaacgtaaggtaagtaaaaatttatgaccattgcactggaacttcaacagcttaaaaaaacctatccaggcggcgttcaggcgcttcgtgggatagatttgcaggtcgaagcgggtgatttttatgcgcttctcgggccgaacggggccgggaaatcgaccactatcggtattatcagctctctggtaaataaaacctccgggcgggtcagcgtatttggttacgatctcgagaaggatgtcgtgaacgctaaacgtcagttgggactggtgccgcaggaatttaacttcaacccgtttgaaaccgtgcagcaaattgtggtgaatcaggcagggtactacggcgtggagcgcaaagaagcgtacatccgcagcgaaaagtatcttaaacaactcgatctatggggaaaacgcaacgaacgtgcgcgtatgttatctggcgggatgaagcgccgtttaatgattgcccgtgcgttaatgcatgaacctaaactactgattctcgacgaaccgaccgcaggcgtggatattgaacttcgccgctcaatgtggggctttttgaaggatttaaacgacaaaggcaccaccatcattctcaccacacactacctggaagaagcagaaatgctgtgccgcaatatcggcattattcaacacggtgagctggtggaaaatacctcgatgaaggcgctgctggcgaagctgaaatcggaaacctttattctcgatctcgcaccgaaaagcccgttaccgaagctcgatggctatcagtatcgactggtcgataccgcgacgctggaagttgaagtgctgcgtgagcaggggatcaacagcgtatttacgcagttaagtgagcagggcattcaggtattaagtatgcgtaacaaagctaaccgtctggaagagctgtttgtttcactggttaatgaaaaacaaggagatcgcgcatgatgcatctttactgggtggcgctaaaaagcatctgggcgaaagagatccatcgctttatgcgtatctgggtgcagacgctggtgccgccagtcatcaccatgaccctttactttattatcttcggtaacctgattggttcgcgtattggcgatatgcatggcttcagctatatgcagttcatcgtaccggggctgatcatgatgtcggtgatcaccaatgcctacgccaacgttgcgtcatcattttttggtgccaagttccagcgtaatattgaagagctgctggtagcgccggttccgactcacgtcattattgccggatatgtcggcggtggcgtggcgcgtggtctgtttgttggcattctggtgacggcaatttcactgttttttgtgccatttcaggtgcattcgtgggtattcgttgccttaacgctggtgctcacggcggtgttgttctcccttgcgggtttgctgaacggtgtgtttgccaaaacgttcgatgacatcagcctggtgccaacctttgtgttaacgccactcacgtatttgggcggggtcttttactcactgactttgttgccgccgttctggcaagggctgtcgcacctgaacccaatcgtttatatgatcagtggtttccgctacggcttcctcggtatcaatgatgttccgctggtcactacctttggcgtactggtggtctttattgtggcgttttatttgatctgttggtcgctgatccaacgtggacgtggtttgcgtagctaaggctatttcctctcctctggatttgggggagaggagttttgacggctatcaccctttatcaacaatggtcagggtagactgattttcggctaaggaggaaggcgatgttaggttgggtaattacctgtcacgatgaccgggcgcaagagatactggatgcgctggagaaaaaacatggggcacttcttcagtgccgggccgtgaatttctggcgcggattaagctctaatatgctcagccgcatgatgtgcgatgctctgcatgaagcggactctggtgagggtgtcatcttcttaaccgatatagccggagcgccaccgtatcgcgtggcttcattattaagccacaaacactcccgttgcgaagtgatttctggtgtcacgttaccgttaattgaacagatgatggcttgccgtgaaaccatgaccagttcagagtttcgcgagcgtattgtcgaactgggtgcgccggaggtgagtagtctttggcaccaacaacaaaaaaatccgcctttcgtcctcaaacataatttgtatgagtattaacccgcgattctgatggcgcttttgctacaataaaagcgttgtttcaccctcggttattttttcatgtacaaacaagctgttattctcctgctgatgctgtttaccgcaagtgtcagtgccgcgttacctgcccgttatatgcaaaccatcgaaaatgctgcggtctgggcgcaaattggtgacaagatggtgaccgtggggaatattcgggccggacaaatcattgccgtggagcccactgccgcaagttattacgcatttaattttggctttggcaaaggttttatcgataaaggtcatctcgagccggttcaggggcgacaaaaagttgaagacggtttgggcgacctcaacaagccgctgagtaatcagaacttagttacctggaaagatacgccggtctataacgcgccgagtgcgggaagtgcgccatttggggtactggcggacaatttgcgctacccgattttgcataaactgaaagacaggttaaatcaaacctggtatcagatccgtattggcgatcgactggcctatatcagcgcactggatgcccaacccgataatggcctgtcggtgctaacctatcaccatattctgcgcgacgaagaaaacacccgttttcgccatacttcgacgaccacatcggtacgcgctttcaataaccagatggcctggctgcgtgacaggggatacgcgacactgagcatggtgcagctggaaggctacgtgaagaataagatcaatctccctgcgcgagcggtggtgattacctttgatgatggcctcaagtcggtgagccgctatgcgtatcctgtgttgaaacaatatggcatgaaggcgacggcgtttattgttacctcacgcatcaaacgtcacccgcagaagtggaacccaaaatcgctgcaatttatgagcgtttctgagcttaacgaaattcgcgatgtatttgatttccagtcacatacccattttttgcatcgggtagatggttatcgccgacccatattactgagccgtagtgagcacaatattctgtttgattttgcacgttcacgccgcgctctggcgcaatttaatccgcatgtctggtatctttcgtatccgtttggcggatttaatgacaacgccgtgaaggcagcaaacgatgccggatttcacctggcggtgacaaccatgaaaggcaaagtaaaaccgggggataatccgttgttactaaaacgactttatatcttaagaacggattcgctggagacgatgtcgcggctggtgagtaaccagccgcagggataacaatcaagcaacctgtaccggaatcgctttcgcggtacgtttcatttcattgtcgccttcaaaataggcgacgttgggtcgccaggtgcgagcttcttcatctggcatggtaacgaagctggcgatgatgacaatatcgccgacactggcgcagtgggccgccgcaccgttaacagaaataattctcgaaccgcgttctgccgcgatggcataagtggagaaacgcttgccgttggtgacattccagatatcaatggcttcgttttcgagaataccggctgcgtcaagaaaatcctggtcaatggcgcaagaaccttcatagtgcaggtccgcatgagtcactttcacgcggtggagtttgccctgcagcatcgtgcgaatcataacttctacctttctaccctgtcgttaacgaagcaggcgatgcctgctttgaggaaattctcacgcagtattgcccgatttttgtttagtgtctactcatctgacggcatttgcgtcagcagtttgcgtaccgcgccgaagcgtgccatgtatcgcctgtaacgaattgatatttctctgaacgctgctcggtaaacaataaagaggtggctgacgatagcgcgccttgactggatactgccttcacgcaaagccacacggaagacagggaagatggatgcaccgagtaccacaccgcatgacgcggtatttaaacaatttttaatgcatgcggagacggctcgcgactttctggagatacatttgccagtggaattacgcgaactttgtgacctcaacacgcttcatttagagtcggggagtttcattgaagagagcctgaaaggacacagcacggacgtgctctattccgtgcaaatgcagggcaatcccggttatctgcatgttgtgattgaacaccaaagcaagccggataagaaaatggcctttcgcatgatgcgttattctatagccgccatgcaccggcatctggaggctgaccacgataagctgccgctggtggtgccgatactgttttatcagggcgaggccacaccttatccgctatcaatgtgctggtttgatatgttttactcgccggagctggcgcgacgcgtctataacagtcctttcccgctggtggatatcaccatcacaccggatgacgaaatcatgcaacatcggcggattgcgattctcgaactactgcaaaaacatattcgccagcgcgacttaatgttattgcttgagcaactggtcacgctgatcgacgaagggtacactagcggaagtcagttagttgccatgcaaaactatatgctgcaacgcggtcatactgaacaagcggatttgttttacggtgtgttgagagacagggaaacgggaggggagtctatgatgacgctggcgcagtggtttgaagagaaagggattgagaaggggattcagcagggaagacaggaagtaagtcaggaattcgcccagcgtcttctgagtaaaggaatgtctcgggaagacgttgcagagatggcaaatttacctcttgctgagattgataaggtaattaaccttatttaagttacctgtgttatgacagatgacgtggggtaaattaataactggcgccatcagccgtagcgccagttaagtattacgccagctcgaccattttgttgtcgatcaggcgagcatcgccaagccaggcggctaccagaattactgcccgtttgctggtttcagaaacttccagcaatgtgtcggcatcgcgaatctgaatatcatcggcgcggaagcctttttcattcagttcttgccccgcaatggtaataatttcatcgagatcccgttccccagcctgcaatttgtcagcaatcgaacttaaaactttgtacagaccaggcgcaattttgcgttgttccgccgtcagataaccgttacgggaacttagcgccagaccgtctttggcgcgcataattggcacaccgacaatctcaatatcgaagcccatatcggcaaccattttgcggatcagcgccagttgctgaaaatctttttcaccgaagcaggcgatgtccggctggaccaggttgaacagcttgctgacaatagtcgaaacgccgcgaaaatgtcccggacggctggcaccttccagcatggtcgaaaggccaggaacgtcaacgtaagtgtgggtttcagtaccgttcgggtagatctcttttaccgaaggggcgaaaactaaatccactttacgtttgtttagcttctcgcagtcctcctgcaaggtccgtggataacgagccagatcttccgggcggtcgaactgcatcgggttaacgaaaatactgacgacgaccacatcggcgcgggctttggcttcgtcgaccagcttcatatggccatcgtgcaggttacccatggtaggcaccagcgccacgcgcttgccttccatacgcaggcggcgaatttgctgacgcagcagcggcagggtttcgataattaacacaacgtgactccttaatggaaactgtgttcttcgcccggataaacgccggactccacttcagccatatactgccgcacagccgcgcggatgtcgcccgtttcggcgaggaaatttttagcgaatttaggaatgtgaccgccggtaataccaaaggcgtcgtgcatcacgaggatctgcccgtcagtgacgttgcctgcgccaatgccaataaccgggatcgccagtgcttcggtaatacgttttgccagttcaaccggcacgcattccagcaccagcagctgtgccccagcagcttctaaggctaatgcatcgctgagcagttgatcgcccgcttcatcgccgcgcccctgaactttgtagccaccgaaaatattcactgactgtggtgttaaacctaagtgaccacatacaggaacggcacgttcggtcagcatttgtacggtttctaccagccactcaccgccttcaattttgaccatgttagcaccggcacgcataaccgttgcggcgttttcgaaggcttgttccggcgtggcatacgccataaacggcaggtcagccagcagcaggcagtttggtgcgccgcgacgtacggcggcagtgtggtaggcgatatcggcaacggtaactggcagggtggagtcgtgcccctgaaccgtcatgcccagcgaatcgcccaccagcatgacgttaagcccttcatcagcaaagagtttggcgaagctatagtcataagcggtgatggtcgcgaaacgttttttttcctgtttgtacttctgcagtaaggagatggtggtcggtttcataacgtatcctgataaattgatgttgtgctgtctggcattttatcagtcacattggtgggggcaatgatttatccgtagcagcactgccagaaggtgacagtgctgctacgttatcagggataggttacctggaaagtactggtggctttaaattcgccgggttcgatagcaatattcccgtcttgctttaatgttgcctggaaatgaagaggctgtgatgtgccgttaccttgattagggtaaaccccatcggaggtgtcatcttcggtttcataatctatataaacagaattcgtatcattaggttttaatgtcattagcggatttttactggttgctaaaccttcaatgagtacgccaacgcctttggcggcagtgcttccagtaagcgtattaccaagcagttgtgtgttttgagtacctacttttccagtgacgagttttgtttcaatattacgcacacgaatacaattctgaagcgagatatcaaagggaacaggtgaagcgccatttttaattgtcccagagctatattctcccattctaaccgttgaaccattgactgatggcccggtaagtatggaggtaaaacatgttggtaaggttaatttgacattattcagtgtgaaattgacataaatgtggttgctgtgatctacaacttttgtaccaggactgtaggccttaaacgaataaaggtaatttgatgaactggataactggacttgctgattaagtgtaggatcgaaattagtatctgtataaaattcaacagttatgttgtgtactataccaccaatagcccaaaacttatcgtagtcgtctgctttgttgcaacccttagtttgtagatcgctgtctgtgacggaaaagaaaaattcttggttggaaggatctccgatatagattcctggcgattgaatgtcagttattgtatcgtatgcagaccagacccttgatattaacatggtgtaatacagaccaggaacagatgtattaaatagtttatgtccgccataatctttacctgaatagaccatggcattttcaatagttattggaccaggattcgctctgccagatgtattgcagtaaagaataccaccaccggtacctgtatccaggtatgaccagtacatttttaccccagtcgggccgagctgcgtgggtttataaaaaaccaagttgcttgctgttgatgtgtaattaaaggtcatctgtgcggcagtggaggggcctcgatagttatcaactcctgcattatttcccacaataaaacttgtatatgcactgactgtattacaacaagaatacagtgctaaaaaaagaatgtacctgaagatagtcttcatttttactccaatgtttctttattgttatggtttgcgctgtttttgtttgttattcgtagtaaatatccactaacacatggctcataagttgaccagatgtaacactcaatgcaggatcgattttttgcattcgggtgctaaatttccaggatgaaccattcatgtcatccgacattactggataaacggaacgagatccgcctgaagcattaagaacattgaatgtattcgccgaatcctgagtagaaaatataactactcctacattacttgctcctgacgaaatttcattagcaaatatttgcctagagccagcagccatgacaccgctaagggctctaaaatcaatatgtaactgatttagcacatcgccagttccctgtaatgcacagtcggatacagtgatagtgaactcttttccacctggttgataactttcaggagtaacattacctgaaaaatatcccaccccaacgacgccaagatcaatattaccctggttactgattccgcttttgcaggtgctgttttttacattggcaacaaggtcaatatcctgtccagcaatggctggacaggcgatgcaaaacagtaatgacagaaacagaattattctcttcatcagcttacgttgagtgggatgcatatatagttcctgaatctgtaagtctgttagttataggttactgtaaatgtggctggtgcagaaaacttacccgcagtgacattgtttacggttttatttttttccacgaccaggcgtgcactcatcggataataaacgaccgcattggctgcagtggagattgttacctcttgtgatgctggtgttacacagctaaattgtgttgcactccctgttgccggagttacagtgctccagacttcaacggcgacagcacttgctttatctgcggctgtggaaccatttgcaaaccccgcaccgtcattagcagttccctcgcatgtggctcgcttggttaattttatttgcgcttttttattggggatacccgcacagtctttgaatttgagtttgaatgtttttactttggtcttggcattgatttcagaaatatatacatcaccaaaatcaacaacagaaatgtcctgatcagagtcatttactaatgtagcggtacaagtacccatttctacagtagtaataacggtcagtccaatactgtctgttgccgcataagagagtacgctgaacaatgaggcagccaaaacgacactgctggataatccataacgtaaatttttaaatgtcatcataattatccttcttattgatagatgaaattaaacgtcgccagtgcacgaaaattccccggtacgccttgccctgcatctgtttcacgtagcgcaacggtcatttcaagacccttatcgggctgcatctcgtctgtgctccagcgtatcttttccgcactgttaggtttaaggaaagtggcatcatcagtagtccgttttttgaaacccataccgatattacttgtcgtcgaagatgaatcaccagactgcggtataataagcttaggtgagcttgatgatgcatttccggtcagagtggtatcaatccaactgatgccactgctgcacccactggcaaccagtttaaaatcagcctgagattctgtcgttttattcgcgatcttatccagacccatcttagggattctcaatgtgtagttattattgccatcattcgtgacgttattaccagtaagtgtgatgttacaggttgtcgctttgacagtggctgtaaactctacattaatatccgttgcaaatactgagggtgataataatattcccatcagtatcactattttatgtggcgttgtttttatcatttgacgtcccttgtagttactgaatctgacaccgaattccattcagaataatagattgtgctattttttctgcttctgggctttgttgataatgcgcaagacaacttacgggtttactttgttcgagccatttaatgctgatatttccctgctgctcaataccacgaacaaatgcttgtccaccctgtccaacattaccaatgacattgccttgctcatcataaatatctgcagcaaatggaatatttttaccatcacttcgtgtgatgttcataatggctgattgcccttgcacggtttcaaaatcagcaaagacgactgaaccctgacgcggtacagctactgcactggtactttttaattcaacatcgttctcaagatcgttgatatccagcgcgatacggttttcatgataaggagaaagagcgctggtgacaccataaccccatcgatcgatagtactgttgccataatttattcgcgctccttgagcacctggagcctgaactaccgccagtgtatcggagtcgctaaaactatcattactgaaagtcagtccaccgctatgcaatacaaaaccaccgtcggtgctgagagaaacttgacggctgttatcgctatttgcagaaattgaacctgccagcgttccccatggtgactcatagctggcataacccccaacataactcaaatctttgctggctttattcatcgtatagccagtattcacgctataactgacgcgagcgttatcgctatagccactgctgctaacgttgagttggttattacccttaaagtcactgcttatttgagtatcaatactctggaaacctgaagtacgttgttcagtgccaagtaatttttcaattggaatggtgaaactaagataaacgctatcgtcagtgtcgccgtcttcattccatgaacgctgggcactgacactgtagctgccccaggatgtactgttactgtagccaatagagtaattgctacgattttgtccggaagcccagtaatcggaccaacttccggaaagataaaatgaaccgtaatcttttttctcaaatttcaacggttggttaatactgaccgtaacctgatttttcatgcgtgagtaattacgcatggatttcggttcaagatcttgttcgggatgtttcacttcatcaattagagttagtgcatcattaagaccaaggtaattctgtgtcgaatagcgataggccgcgatattcagtgaagtacttgtttcttcgaataacttgttccaggaaacacgataactttgcccctggtatgttttatcatccgggatacgaacattggaatgagtcacatcgaaagaaaatgcaccaactgaagtattcagaccaagacctaacaaaccagcggtatagttattatcggttatctgaataccggtataacccgtcagatagttattcaggccgtagtagtagcttgcttgaaataaattaggctcatcctgaatatcatcttttaagacctgaccgccgctaatatcccaacgtccaacgccagggcgtaacatttgaacaacggatgagaaaggttgcgagaatgtccgctttgagccatcggattcttcgatggtaacaataagatcgctgccgtaccctgacggactcagatcatcaatgacgaaagcgcctggcggcaccgtcgtttcataaatcttatagccaccttgcgtaatagtgactttggcgttggtattggcaacgccatgaatgataggcgcaaagctggctaaagtcggaggcaacatgcggctgtcactgtataaacgaatgcctcggatactgacggaatcaaaggtttcgcccgtcgtataagactcaccaagaatgagttgagaacgcagcgaggcgatatcacgctgaacataccgattcttaaaatcataattactgccagaatcggtcatccagttgtagttgcccgaggcacgcagtcgccatgcacctaaattcatcccaccgttaaatgcagcataaatgctttcattttttcgaccaggggtttcactatgatatccgttgaggttgtatgacaacatggccgcattaatgccgttttcccataacgatggatcaacatagttttggtaatttttcattacccaggcttgaggaacgtctatatccagacgttgatcgttaacgtcataacgaacagaagcctgagggataatttccgtcaaattgaggcaattgccgagcgtttcatccctggcaagcagaacggctttttcgttatttatatcgggagaattaatatgaaactgcaataaattctttaatgtgatacaagcctgggcgttcttttttccttcaattgcgacaaatgtaatactttggttaatgattggttggtcgtttacataaacactgacgtcgtaaacacccggtatagcggggttaccttcactgtaccggctgagatcaatattagatgcattctgccccatcaggaaggtatggtcatattcaacgagttcagcactgaaagcagtattgcaatacagcagcgcgcaaaacgtggcgatacgggtcagatgatgataatttttagtatattctatagtcacgctatgcttcctgcggaattatatccttgcctgattacagcctggcattaccttcaattgcgccaccaaagtcattaatggcgtaaaaatgcacttttgcagaattcgctttgccattaaggccattgactttcatgacctcatcactaaatggtgcaatcattttcacatcaatcggatagcgtttaccgctagcttctaaatcaccactgctaaaagagacgtagtaaggggttggattggtcactcgtaatgacgccttaccttctgaacctgaccagaaccacttcagggctaacggggcttcagagggatttcccttcaatccatccgggcgatagaaaagttttatacgtgtgcgaaatgccagttgcagcaggctttgattcgcgaccttttctgcatctggttttggtggaacttccagtacgttaaaccagaacacgctctctctgtctttaggcagtgaggtgctggctgtgtacattaatttgattgtttgcccacgtttggcatcaatacgcgatactggcggcgtagcagtaaaagggactgtaatactgccaggctcagcgttgtcatcgccagtatctaaccaactctggacaagcaacgggttattccctttattttccagacgtacgttgacacttttttgatcgcttttatatattacgcgagtacccgaaatgacaatgtccgcaatagacgatgaactaaaagccatacaggttacgaagcataaagctgttgtatgtttggtgttaaaaaacataaaccatccctgatagagttaattaaaacagggaataatataaaatagaaattattattccctgtatattcattcaatcaatttaactggtgaatacttactgataagtaatggtgtatgcagtgttagtttttacataaccagcagttgctgtttggtctgcgacggcacgaacgtaagacgctttaaaatcataaacagcagattttgtcgttgcatccagggctttagtatacacatcgccagggttgttaatttgaacctgtttgatagtggaaccatcaatattgtgtagagcgatattaacgccgtcagatgggttgttaatagacatgtcgttgttcaaagtccctttgctgttaccaaagaaaacagaaccgaaggtcattttagccgtgctacctggattcggatttgctttgctgcagtcaacggtgatgctgaaaggtttagctttagcgccaacggtgtcattcagtacgccagcatcgatttcaccaacggttgcggtttgcagcaggatcagaccatccttgttaccgccgtcaacgcgggtttcacaggtgttatcaacaaccagaccactgatatttaactgaccgccgtccatatcagcagaagcagtacctgcaaccatcgccagcataagaccagacagggcaaaacctaattttttagacataaaaatcctttaataaaattccattagtcagactacatgtttgaagaatgactattcatgacacaaataggagaaacaaatgttagatattaatgagcaatgatatttgttacccaaatttacaaccattgttcattaggtcgcctattgtgcactttagaagcttttgaacaaattaaatttacttaattcaaaattaagtaaaaataagttcacaagtgcaattggttagggtatggagatgggattgatatttatttataggaagttatattatttccgcaaagagatgtttaaactaaaatcgtaattaaggaaagagatgagatatgattttcagaaaatatttatattcgcaatataaataaattaccatttgtttaatttgtcaaatgctcttgtatgtaagatttgacgcaacatctccccatcaggaaacaccaactccggcgcgatttcaaacagcggccacagcataaatccacgattcttcatatcgtagtgcggaacggtcaggcgttcagtatttatcacttcattaccaaacagcatgatgtcgagatccagcgtgcgtggtccccagcgttcagctttgcggacgcgaccttgctgcaattcaatacgctgtgtgtgattgagtagctcttcaggtgcaagagaggtttccagcgccacggctgcgtttaagtaatcgggttgatcttgcggccccagcggtggggtgcggtaaaacgaagaaacggtaagaatgtggctttcagggatatcgcctaatgctttcagggcagcattgacctgctccagcggagaggccagattgctgcctatggcaatatacgccactgtcatgcggtaccctcacgacgtggtgcgcgtttgcgtggacgacgagtacgacgacgcggtgacggttcttcatccagctcgttgagcatccctttttggtctggtggcgcggaaacctggaactcaccccaccatttcaccagacgctgcagttcagcgttacgctcaacttcagctcgcaaggccaacaggtcataagccgcacggaacttaggatgctccagcagtttccatgcgcgtttaccctgacgacgggacatacgcaactgcaactgccagatatcgcgggttaatgtcgtcagacgtttcgggattgccagtgaacggcaggcttcgtccagcacgtcgttcatcgccagcgcgaaagcgtcgtgataggtcaggccgctttcctgggcgatcttctgtgccgtctccagcagtgggtaccagaacatggcggcaaacaggaacgccgggttcacgcgcatatcgttatggatacgcgtatcggtattcttcagcacctgttcaatgatccgctccatcgggctgtcgccattttccgtgaagtagcgggtaatggtcgggaacagcggctggaacagatgatattcacacaacagcttataggtttcgtaaccgtagcccgcttgtagcagtttaagcgattcttcaaacaggcgtgccggtgggatatcgttcagcagggtagcgaggcgagggatcggttctgcggtttccgggctgatgcgcatacccaatttggcggcaaaacgtaccgcgcgcagcatacgtaccggatcttcacggtagcgcgtttccgggttaccaatcagacggataacgccgtccttcagatccttcatgccgccaacgtaatcacggacggtaaaatccgctacgctgtaatacaggctgttgatagtgaaatcgcggcgctgggcgtcttcttcgatggagccgaaaatgttgtcgcgcagcaacatgccgttttgcccgcgttgggaggtcgtgcggtcgctgacgttaccttcgtggtgtccacggaaggtcgcaacttcgataatctccgggccaaacattacatgagccagacggaaacggcgacccaccaggcggcagttacggaacagtttgcgcacctgctcaggcgtggcgttagtggttacgtcaaaatctttcggctttttgccaagtaacaggtcgcgcacgccgccgccaaccagccaggcttcgtatcccgctttattgagcctgtacattaccttcagggcattttcactgatatctttgcgggaaatagcatgctgctcacgcgggatcaccgtcacctgtggacgggcgactgcctgttcagcctcgctttcctcgcggcttagcaccttgcggcaaaaattagcgactcgggtaaaaatagtacacctcggtagtgtcaaacatcattcaggacaaaaaaatagcggctaatcatagctcagcatgacgcatttgagaatgttgaatttacaattgccgactcgggcacggcggtaagccgccagtttttgacggctgactgaaggatttgctcgacgctgaaatcctgccagtgtgcttctgcctgctgccccagaaattgaagtgccgcgattagtaccgggcgtggatcgcctttcggcaacgcaggcgcatgattctgcttggaaagtttagcgccttgtggattaagcgccagcggcagatgaatgtaatctggcactttccagccaaaaagctggtacagcgagatttgccttactgttggttcaatcagatcagccccacgcactatttctgtaacgccctggaaatgatcatcaaccacaacagccaggttgtaggcgaacaacccatcacggcgatgaatgataaaatcttcccgtgccagtttttcgtcggcgtgaataatgccgcgcagctggtcagtaaattgcgtgaccggatgctgctggcggatacgcactgcggcgttgtctggtccatgatgcaacacccggcaatgaccgtcgtaaataccgccaatgctttgaatacgcgcacgcgtacaggtgcagtaataacttagtccttgttcatgtaaccaggcgagtgcttcacgataggcgtcgtgacgttgcgattgccagagaacatcgccgtcccagtgcagaccgtaatgttccagctggcgcaggatagtttctgcggcaccgggaacttcacgaggcgggtcgatatcttctatgcgtaccagccagcgaccttgccgggcgcgagcctgcaaatagctgccgagcgcggcgatcagagagccaaaatgaagctcgccggaaggagagggggcgaagcggccaatatactgtgtgtctgtcatctctttgaacaaaaaataaggcgggagcatttcccgcctgtggtaaacgtgatggaacggctgtaattagccagccatctgtttttcgcgaatttcagccagcgttttgcagtcgatgcacagatcggctgtcgggcgcgcttccagacggcgaataccaatttcaacaccgcaggattcgcagtagccgaaatcttcgtcttccacttttttcagcgtcttctcgatctttttgatcagcttacgctcgcgatcgcggttacgcagttcgaggctgaactcttcttcctgggctgcacggtctaccgggtccgggaagttggctgcttcatcctgcatatgtgtaacggtgcgatcgacttcatccctgagttgattacgccatgcttccagaatacgacggaagtgcgccagctgggcttcattcatatactcttcgcccggcttctcctgatatggttccaccccagcgatggcgagaatactcagggacgatgttttacggttttgcccttcttgcatgttgcttctccttaacacgcactatcgatccccatgttcgggggaaaaatgaggccgctataaatagcagatgcttttccggatagcaattatctaaacgtaacacttgacaactgtgtgaggaaaagcgtatttgcgcacgcgaccagaatgtaaattaaccagttacttactttactacaatgtaaccggcagtgattttttaagagccatgccttcagcagaaatttccgctttgtaagccagaatttctacccccctctgttgagcttctgacaatagttgcgcgtatttctcatcgatgtggcgcgcgggtgaaaaccgtgtaatggctgaatgcagcacggcgaaaaagataaccgcacgctggccttcagccgctacgctcatcaactcccgaaggtgtttctgacctcgttcagtgaccgcatcgggaaaatatccctgttcgttctccgctaacgtaaccgatttcacttcaatatagcagtctggacgcgaatccgcctgcaacataaagtcaatacggctgcgttctgcgccgtattttacttcgcttttcagcgagctatagcctgacagttctgaaattgattcattaaggatagcctctttcgtcaacctgttagcccaaagcgtgttgacgcaaataaatgcgccgctctggctttgagttaattcccaggtgtgtgggtatttccgtttggtgttgtctgaagtcgaataccagacggtatcgccaggcgttgcacaaccggtcatcgcacccgtattcgggcagtgtagcgttaattcgcgaccatcgggtgtgatcacatcggctaaaaaacgtttgtaacgctgaattagcgtcgcgcgctgtagagggggagaaaattccattgcgacaatccttgttattgcgttagcgcccagcgttttagcggcgtgtagcgtgtgcgtccacgggcaaacgaggaggcgtaaagggtgaactccgtcaccgcatacgaccagttaaaacctggcggcgggattgtcaccgcctcgctggcgtcgcgcaataaggtaatatgtggatgaaacggacgattgctttgaaaacaaccgctgcgggcagcctgtgaacggagcatattcgccagctggattaagccgcgtggcggctgacgcatccctaaccacaccacacgcgaacgcagccattgtccggcgtcatcaagcgtgagtgtgaaaccaggttgacgaatccgtccggctaaaagagaaagcgccttctctttctcggcgctcacttcgcctaaaaatgccagagtcagatgcaaattatcggcggcgaccggacgtcccgcctcaggtgggaagtgtgtggcgcgccaatggataatctgttcgcggatttctgcaggtaagtcgatagcaaagaacagacgttgcggttcagacatgtgaggcactcggttatgaattaccgcgatgctacaatgtggcgcgaagaatgttaaccctctggagcgttttgtgtcgtcgttgcccgttgctgccgtcttacctgaattacttaccgctctcgattgtgcgccgcaggtattattaagtgcgccgaccggggccgggaaatcaacctggctgccgctgcaactgctggcgcatcccggcattaacgggaaaattatcctgctggagccgcgtcgtctggcggcgcgtaacgtcgcgcaacggctggcggagctgcttaacgaaaagccaggcgataccgttggctaccggatgcgtgcgcaaaactgcgtcgggccgaatacccgcctggaagtggttaccgaaggcgtgctgacgcgcatgatccagcgtgacccggaactgagcggtgttggactggtgatccttgatgaatttcatgagcgcagcttgcaggcggatttggcgttggcgctgttactcgatgtgcaacaaggtctgcgtgatgaccttaaactgctgattatgtcggctaccctggacaacgaccgcttgcagcaaatgctgccagaagcgcctgtcgtcatctcagaagggcgctcgtttccggttgaacgccgttatttaccgctgcccgcgcatcagcgttttgacgatgccgttgcggtagccaccgctgaaatgctgcgtcaggaaagcggatcattactgttatttttacctggcgtcggagaaattcagcgtgtgcaggaacaactggcttcgcgcatcggcagtgatgtattgctctgcccgctgtatggcgcgttgtcgctgaacgatcagcgaaaagcgatcctcccggcaccgcaagggatgcgcaaagtggtgctggcgaccaatattgctgaaaccagtttaaccattgaaggtattcgtctggtggtggattgtgcccaggagcgtgtggcgcgttttgatccgcgcacggggcttacgcgactgattactcaacgcgttagccaggcatccatgacgcagcgtgccgggcgcgccgggcgtctggagccgggtatcagcctgcatttaatcgccaaagaacaagcagaacgcgccgcggcgcaaagtgaaccggagatcttacaaagcgatctttccggtttgctgatggaattactgcaatggggatgcagcgatccggcgcagatgagctggctggatcaaccgccagtagtgaatctactggccgcgaaacgtctgttacaaatgctgggggcactggagggtgaacggcttagtgcgcaagggcaaaaaatggcagcgctgggtaacgatccgcgtttagcggcaatgctggttagcgcgaagaacgacgacgaagctgctaccgcggcaaaaattgccgccattctcgaagagccgccacggatgggcaatagtgacctgggcgtggcgttttcgcgcaatcaaccagcctggcagcaacgtagtcagcaactgttaaaacgcttaaacgtacgtggcggtgaggcagacagttcgcttatcgcgccgctacttgccggggcgtttgccgatcgcattgctcgtcgccgtgggcaagatggacgctatcaactggcaaacggcatgggagcgatgctcgatgccaacgacgcgctaagccgccacgaatggttgatcgcaccgttattattgcagggcagcgcctcgccggatgcgcggattttactggcgctgctggtcgatattgatgagttagtacaacgctgcccgcagctggtacagcagtctgacactgtggagtgggatgacgcgcaaggtacgctgaaagcctggcgtcggctacaaatcggtcagttgacggtgaaagtgcagccgctggcgaaaccgtcagaagacgagttgcatcaggcgatgcttaatggcatccgtgataaaggtttaagcgtgctcaactggacggcggaagcggaacagctacgcttgcgtttgttatgcgccgcaaagtggttgccggaatatgactggccagcggttgatgatgaaagtttattggcagcgctggaaacgtggctgctgccacatatgactggcgtacattcactacgcggcctgaaatcactcgacatttatcaggcactacgcggattacttgattggggaatgcagcaacgtctggatagtgaattgcctgcgcattacactgtgccgacgggaagccggatcgccattcgttatcatgaagataacccgcccgcgctggcggtgagaatgcaagagatgtttggcgaggccaccaatccgacgatcgcccaggggcgcgtgccgctggtgctggagttgctttcacctgcccaaaggccattacaaatcacacgagatttgagcgacttctggaaaggagcgtaccgtgaggtgcaaaaagagatgaaagggcgttatcccaaacatgtctggccggacgacccggcaaatactgcaccgacgcgacggacgaaaaagtattcgtaaggttggttttctccctctccctgtgggagagggccggggtgagggcatcagcgcgcacgttcaccctcaccctaaccctctccctcaagggagaggggaccgatcgagcacaaattttgagagatatcttcttctgtcttgtaacagaagaacagaaaatcgggcttttgcgcctgaatattgcggagaaaaagcatggccgggaatgaccgcgagccaattggacgcaaagggaaaccgacgcgtccggtcaaacaaaaggtaagccgtcgtcgttacgaagatgacgatgattacgacgattatgatgactatgaggatgaagaaccgatgccgcgcaaaggtaagggcaaaggcaaagggcgtaagcctcgtggcaaacgcggctggctatggctactgctaaaactggctatcgtttttgccgtgctgatcgccatttacggcgtttatctcgatcaaaaaattcgtagccgtattgatggcaaggtctggcaactgcctgcggcagtttatggccgaatggtcaatcttgagccagacatgaccatcagcaagaacgagatggtgaagctgctggaggcgacccagtatcgtcaggtgtcgaaaatgacccgtcctggcgaatttaccgtgcaggccaacagcattgagatgattcgccgtccgtttgatttcccggacagtaaagaaggacaggtgcgcgcgcgtctgacctttgatggcgatcatctggcgacgatcgtcaatatggagaacaaccgtcagttcggtttcttccgtcttgatccgcgtctgatcaccatgatctcttcgccaaacggtgagcagcgtctgtttgtgccgcgcagtggtttcccggatttgctggtggatactttgctggcgacagaagaccgtcatttttacgagcatgatggaatcagtctctactcaatcggacgtgcggtgctggcaaacctgaccgccggacgcacggtacagggtgcgagtacgctgacgcaacagctggtgaaaaacctgttcctctccagcgagcgttcttactggcgtaaagcgaacgaagcttacatggcgctgatcatggacgcgcgttacagcaaagaccgtattcttgagctgtatatgaacgaggtgtatctcggtcagagcggcgacaacgaaatccgcggcttcccgctggcaagcttgtattactttggtcgcccggtagaagagctaagcctcgaccagcaggcgctgttagtcggtatggtgaaaggggcgtccatctacaacccgtggcgtaacccaaaactggcgctggagcgacgtaatctggtgctgcgtctgctgcaacagcaacagattattgatcaagaactctatgacatgttgagtgcccgtccgctgggggttcagccgcgcggtggggtgatctctcctcagccagcctttatgcaactggtgcgtcaggagctgcaggcaaaactgggcgataaggtaaaagatctctccggcgtgaagatcttcactacctttgactcggtggcccaggacgcggcagaaaaagccgccgtggaaggcattccggcactgaagaaacagcgtaagttgagcgatcttgaaactgcgattgtggtcgtcgaccgctttagtggtgaagttcgtgcgatggtcggaggttctgagccgcagtttgcgggctacaaccgtgcgatgcaggcgcgtcgttcgattggttcccttgcaaaaccagcgacttatctgacggccttaagccagccgaaaatctatcgtctgaatacgtggattgcggatgcgccaattgcgctgcgtcagccgaatggccaggtctggtcaccgcagaatgatgaccgtcgttatagcgaaagcggcagagtgatgctggtggatgcgttgacccgttcgatgaacgtgccgacggtaaatctggggatggcgctggggctgcctgcggttacggagacctggattaaactgggcgtaccgaaagatcagttgcatccggttccggcaatgctgctgggggcgttgaacttaacgccaatcgaagtggcgcaggcattccagaccatcgccagcggtggtaaccgtgcaccgctttctgcgctgcgttcggtaatcgcggaagatggcaaagtgctgtatcagagcttcccgcaggcggaacgcgctgttccggcgcaggcggcgtatctgacactatggaccatgcagcaggtggtacaacgcggtacgggtcgtcagcttggggcgaaatacccgaacctgcatctggcagggaaaacagggactaccaacaataacgtagatacctggtttgcgggcattgacggcagcacggtgaccatcacctgggtcggccgtgataacaaccagccgaccaaactgtatggtgccagcggggcaatgtcgatttatcagcgttatctggctaaccagacgccaacgccgctgaatcttgttccgccagaagatattgcagatatgggcgtggactacgacggcaactttgtttgcagcggtggcatgcgtatcttgccggtctggaccagcgatccgcaatcgctgtgccagcagagcgagatgcagcagcagccgtcaggcaatccgtttgatcagtcttctcagccgcagcaacagccgcaacagcaacctgctcagcaagagcagaaagacagcgacggtgtagccggttggatcaaggatatgtttggtagtaattaacatctaagcgtgaaataccggatggcgagttgccatccggtaaaataacatcccatctaagatattaaccctttcttttcatctggttgtttattaacccttcaggaacgctcagattgcgtaccgcttgcgaacccgccagcgtttcgaatattatcttatctttataataatcattctcgtttacgttatcattcactttacatcagagatataccaatggcgcgttccaaaactgctcagccaaaacactcactgcgtaaaatcgcagttgtagtagccacagcggttagcggcatgtctgtttatgcacaggcagcggttgaaccgaaagaagacactatcaccgttaccgctgcacctgcgccgcaagaaagcgcatgggggcctgctgcaactattgcggcgcgacagtctgctaccggcactaaaaccgatacgccgattcaaaaagtgccacagtctatttctgttgtgaccgccgaagagatggcgctgcatcagccgaagtcggtaaaagaagcgcttagctacacgccgggtgtctctgttggtacgcgtggcgcatccaacacctatgaccacctgatcattcgcggctttgcggcagaaggccaaagccagaataactatctgaatggcctgaagttgcagggcaacttctataacgatgcggtcattgacccgtatatgctggaacgcgctgaaattatgcgtggcccggtttccgtgctttacggtaaaagcagtcctggcggcctgttgaatatggtcagcaagcgtccgaccaccgaaccgctgaaagaagttcagtttaaagccggtactgacagcctgttccagactggttttgactttagcgattcgttggatgatgacggtgtttactcttatcgcctgaccggtcttgcgcgttctgccaatgcccagcagaaagggtcagaagagcagcgttatgctattgcaccggcgttcacctggcgtccggatgataaaaccaattttaccttcctttcttacttccagaacgagccggaaaccggttattacggctggttgccgaaagagggaaccgttgagccgctgccgaacggtaagcgtctgccgacagactttaatgaaggggcgaagaacaacacctattctcgtaatgagaagatggtcggctacagcttcgatcacgaatttaacgacacctttactgtgcgtcagaacctgcgctttgctgaaaacaaaacctcgcaaaacagcgtttatggttacggcgtctgctccgatccggcgaatgcttacagcaaacagtgtgcggcattagcgccagcggataaaggccattatctggcacgtaaatacgtcgttgatgatgagaagctgcaaaacttctccgttgatacccagttgcagagcaagtttgccactggcgatatcgaccacaccctgctgaccggtgtcgactttatgcgtatgcgtaatgacatcaacgcctggtttggttacgacgactctgtgccactgctcaatctgtacaatccggtgaataccgatttcgacttcaatgccaaagatccggcaaactccggcccttaccgcattctgaataaacagaaacaaacgggcgtttatgttcaggatcaggcgcagtgggataaagtgctggtcaccctaggcggtcgttatgactgggcagatcaagaatctcttaaccgcgttgccgggacgaccgataaacgtgatgacaaacagtttacctggcgtggtggtgttaactacctgtttgataatggtgtaacaccttacttcagctatagcgaatcgtttgaaccttcttcgcaagttgggaaggatggtaatattttcgcaccgtctaaaggtaagcagtatgaagtcggcgtgaaatatgtaccggaagatcgtccgattgtagttactggtgccgtgtataatctcactaaaaccaacaacctgatggcggaccctgagggttccttcttctcggttgaaggtggcgagatccgcgcacgtggcgtagaaatcgaagcgaaagcggcgctgtcggcgagtgttaacgtagtcggttcttatacttacaccgatgcggaatacaccaccgatactacctataaaggcaatacgcctgcacaggtgccaaaacacatggcttcgttgtgggctgactacaccttctttgacggtccgctttcaggtctgacgctgggcaccggtggtcgttatactggctccagttatggtgatccggctaactcctttaaagtgggaagttatacggtcgtggatgcgttagtacgttatgatctggcgcgagtcggcatggctggctccaacgtggcgctgcatgttaacaacctgttcgatcgtgaatacgtcgccagctgctttaacacttatggctgcttctggggcgcagaacgtcaggtcgttgcaaccgcaaccttccgtttctaatttctcttttggggcacggatttccgtgcccatttcacaagttggctgttatgcaggaatacacgaatcattccgataccacttttgcactgcgtaatatctcctttcgtgtgcccgggcgcacgcttttgcatccgctgtcgttaacctttcctgccgggaaagtgaccggtctgattggtcacaacggttctggtaaatccactctgctcaaaatgcttggccgtcatcagccgccgtcggaaggggagattcttcttgatgcccaaccgctggaaagctggagcagcaaagcgtttgcccgcaaagtggcttatttgccgcagcagcttcctccggcagaagggatgaccgtgcgtgaactggtggcgattggtcgttacccgtggcatggcgcgctggggcgctttggggcggcagatcgcgaaaaagtcgaggaagctatctcgctggttggcttaaaaccgctggcgcatcggctggtcgatagtctctctggcggcgaacgtcagcgggcgtggatcgccatgctggtggcgcaggatagccgttgtctgttgctcgacgaaccgacctcggcgctggatatcgcccaccaggttgatgtgctgtcgctggtgcaccgtttaagtcaggagcgtggcctgacggtcattgccgtgttgcacgatatcaatatggcggcacgctactgtgattatctggtcgccctgcgcggcggtgaaatgattgctcagggaacgcctgcggaaattatgcgcggcgaaaccctcgaaatgatttatggcatcccgatgggtattttgccgcatccggcgggtgctgcacctgtgagttttgtttattgatgagcggcttacctcttatttcgcgccgtcgactgttaacggcgatggcgctttctccgttgttatggcagatgaataccgcccacgcggcggctattgatcccaatcgtattgtggcgctggagtggttgccggtggaattactgctggcgctcggcatcgtgccttacggcgtggcggataccatcaactatcgcctgtgggtcagcgaaccaccattgccggactcagtgatcgacgtcggtttgcgcacagaacctaaccttgaactgctgaccgaaatgaaaccatcgtttatggtctggtcggcaggatatggcccttcaccagaaatgctggctcgtattgcgccgggtcgcggatttaacttcagtgacggcaaacagccgttggcgatggcgcgtaaatcgctgacggaaatggcagatttacttaacctgcaaagcgcagcggaaacgcatttagcgcaatatgaagactttatccgcagcatgaaaccccgctttgtgaagcgtggtgcgcgtccgttattgctgacgacgcttatcgatccgcgccatatgctggtcttcggtccaaacagcttgttccaggaaattcttgatgagtacggcatcccaaatgcctggcaaggggaaaccaacttctggggcagtaccgccgtcagtatcgatcgtctggcggcgtataaagacgttgatgtgctctgttttgatcacgacaacagcaaagacatggatgcgctaatggcaacgccgctgtggcaggccatgccgtttgtccgcgccggacgctttcagcgcgtacctgcagtctggttttatggtgcgacgctctcggcaatgcactttgtgcgcgttctggataacgccatcggaggtaaagcgtgagtaaacgaattgcgcttttcccggcgttattgctggcgctgttagtgattgtcgctacggcgctcacctggatgaacttctcgcaggcgctgccgcgtagccagtgggcgcaggctgcctggtcgccggatattgacgtcatcgagcagatgatttttcactacagcttgttgccgcgtctggcgatttcgctgctggtgggcgcgggtctggggctggtgggcgtgctgtttcagcaagtgctgcgtaacccgctggcggagccgacgacgcttggcgttgctacaggcgcgcaactggggattaccgtcactacgctctgggcgatccctggtgcgatggcgagccagtttgctgcgcaggcaggggcttgtgttgttggcttaattgtctttggcgtcgcgtgggggaaacggctgtcgccggtaacgctgattctcgcggggttggtagtgagcctttattgcggcgcaatcaatcagttactggttatcttccatcatgaccaactgcaaagcatgtttctgtggagcactggaacgctgacgcaaaccgactggggcggcgttgagcgtttatggccgcagctgctgggcggtgtgatgctgacgttgctgctacttcgtccgttaaccctgatggggcttgatgatggcgtggcgcgcaatctcgggctggccttgtcgcttgcgcgtctggcagcgctgtcgctggcgattgtcatcagtgcgctgctggtgaacgctgtggggattatcggctttatcgggttgttcgcgccgctgctggcaaaaatgctgggggcgcggcgtctgctgccacgactgatgctggcgtcgttgattggtgcgctgatcctctggctttccgatcaaatcatcctctggctgactcgcgtgtggatggaagtgtccaccggttcggtcactgcgttgatcggtgcgccgctgctactgtggctgttgccgcgtttacgcagcattagcgcgccggatatgaaggtcaacgatcgtgtcgcggctgaacgccaacatgtgctggcgtttgccctcgcgggcggcgtgctgctgttgatggctgtggtggtggcgctgtcgtttggtcgtgatgcgcacggctggacgtgggcgagcggggcgttgctcgaggatttaatgccctggcgctggccgcgaattatggcggcgctgtttgcgggcgtcatgctggcggtggcgggctgtattattcagcgactgaccggaaacccgatggcaagcccggaagtgctggggattagctccggcgcggcgtttggcgtggtgttgatgctgtttctggtgccgggtaatgcctttggctggctgttacctgcaggcagtctcggcgcggcggtgacgctgttgatcattatgatcgccgccggccgcggtggattttccccacaccgtatgttactggcggggatggcgttaagcaccgcgttcaccatgcttttgatgatgttgcaggcaagtggtgacccgcgaatggcgcaagtgctgacctggatttccggttcgacctacaacgcgaccgatgcgcaggtctggcgcaccggaattgtgatggtgattttgctggcgattaccccgctgtgccgccgctggctgaccattttaccgctgggtggtgataccgcccgagccgtaggaatggcgctgacgccgacgcgaattgcgctgctgctgttagcggcttgcctgacggcgaccgcgacgatgactattggaccgttgagttttgttggtttaatggcaccgcatattgcgcggatgatgggctttcgacggacgatgccacacatcgtaatttcggcgctggtgggtggtttactgctggtgttcgctgactggtgtgggcggatggtgctgtttccattccagatcccggcggggctgctgtcaacctttatcggcgcgccatattttatctatttgttgagaaagcagagccgttaatttttccatataacggccctgtacgcctggacggataaagcgtttacgcgacaacggatgcccgatgcgacgctggcgcgtcttatcgggcctacaaacggccccgaatcgtaggtcggataaggcgttcacgccgcatccgacaaaccatgctggatcacaacttcgcaaacacccgacgtgcagcatcgatggtgttattgatatcttccatgctgtgcgccacggacataaagcccgcttcaaacgctgacggtgccaggtaaacaccttcgtccagcatcatatggaagaaacgcttaaagcgttccacgtcacaggccatcacatcctgatagcacgtcacggactcggcgtcggtaaagaaaataccgaacatgccgccaacgtggttaacgaccagcggaattccggcttcttctgccgcttccagcagaccttctgccagacgtgttgtcagctcatccagcgtttcgtgaacgcccggctgcgcgacttcattcagacaggcgaaacccgctgccatcgcaatcgggttaccggaaagcgtacccgcctgatagaccggacccgtcggggccagcgcatccattacatcacgacgaccaccgaatgcgcctaccggcattccaccgccgatgattttgccgaggcaggttaaatctggcactacgccgtaataatcctgtgcgccagctagcgctacgcggaaaccggtcatcacttcatcgatgatcagcaacgcgccaaattcgtcgcacagcgcgcgcagacctggcaggaactctggcagcggcggaacacagttcatattgcctgccaccggctcgacgataatacaggcaatctcttgcgggtattgctcaaatgcggcgcgtacagaagccagatcattataagtacaggttaaggtatatttggcgaaatctgccggaacgcccggcgagtttggctggcctaacgtgagtgcgccagaaccggctttcaccagcaggcagtcagcgtgaccatggtaacacccttcaaatttaataattttgtcgcgaccggtaaaaccacgggccaggcggatggcgctcatggtcgcttcagtgccggagttcaccatgcgcaccatatccatggtcgggaccagttcggtcaccagttgcgccattttcacttccatttcggttggtgcaccaaagcttaaaccacgctcggcggcttcaatcacggcattgcggattgccggatggttatggcccagcaccatcggcccccaggaaccgacataatcgatataggctttgccatcaacatcgtacagataagcgccgtccgctttttcgataaacagtggagtgccgcccacgccagtaaaggcgcgaacaggggagttcacaccgccagggatcagctcgcgcgctgcgctgtaaagattttcagacttactcatggagggttcctgattcgtagaaaaagtgaatggctgctattctatgttattcataacaagttaaatactcgtcaaacatcaggctgcttgtactggtgcaatcctgatttcttagagtataaaagttttgtgcatttgaaacattacgctttgcaaaggattttcatggaacgtgcgagtaaaatgccgtcatcttatttgtatgaccaataagtgatcattggatgaaaactgatactccctctttagaaacaccgcaggccgcgcgcctgcgacgcagacaactgattcgccaacttcttgagcgcgataaaaccccgttagccattttgtttatggcggcagtcgtcggcacgcttgttgggctggcagcggttgcttttgacaaaggtgtcgcctggttgcagaaccaacgtatgggggcgctggtacatactgctgataattatccgcttctgttaaccgtcgcttttctctgttcggcggtgctggcgatgtttggctactttttggtgcgcaaatacgcgccggaagcaggtggttcggggatcccggaaattgaaggggcgctggaagatcaacgtcccgttcgctggtggcgtgtattgccggtgaagttctttggcgggctggggacactcggcggaggcatggtgttggggcgcgaagggccaaccgtgcagatcggcggtaacattggccgtatggtgcttgatattttccgcctgaaaggtgacgaagctcgccatacgctgctggcaaccggtgctgctgcggggctggctgcggcctttaacgcgccgctggcgggtattttgtttattatcgaagagatgcgtccgcagtttcgctatacgttaatttcgattaaagcggtatttattggtgtcattatgtcgaccattatgtaccggatttttaatcatgaagttgcgttgattgacgtcggtaaactttctgatgcgccgcttaatacgctgtggctttatctgatcctcggtattatttttggcattttcggccctatttttaataaatgggtgctggggatgcaggatttgctgcaccgtgtgcacggcggcaatattaccaaatgggtgctaatgggcggtgcgattggcggtctgtgtggattgctggggtttgtggcaccagcaacgtcgggcggcggttttaacctgattcctatcgctaccgcggggaatttcagcatgggaatgctggtgtttatcttcgtcgcgcgggtcattaccaccttactctgcttctcttccggcgcgccgggcggtatttttgccccgatgctggcgctgggtactgtgctgggaaccgctttcggaatggttgccgttgagctgtttccgcaatatcaccttgaggcggggacgtttgctattgccggaatgggggcattactggcggcatctattcgcgcgccgttaacggggatcattctggttctggagatgaccgataactaccagctcattttgccaatgattattaccggtcttggcgcaacactattagcgcaatttaccggcgggaaaccgctatactcggcgattcttgcgcgcacgctggcaaaacaggaagctgagcaactggcgcgaagcaaggccgcatcagccagcgagaatacttgaacgaaataccagggtattagataatggcgattattattgggttagaatttgcccaattgccgatgtcgtttggagcaaaatatgagtgatgacgtagcactgccgctggagtttaccgacgcagcagccaacaaagttaaaagcctgatcgctgacgaagataacccgaatctgaaattacgcgtgtatatcaccggtggcggttgcagcggcttccagtatggtttcacctttgatgatcaggtgaacgaaggcgatatgaccatcgaaaaacagggcgttggcctggtggttgatccgatgagcctgcaatatctggtcggcggttccgttgattataccgaaggtctggaaggttctcgtttcatcgtgaccaacccgaacgcgaaaagcacctgcggttgcggttcttcctttagtatctaatctgttgttcatgtgccggataaactatccggcacatcttctctcttcaacgcccattctcatccagcgcaaacgtcggtagcttaagatgccaacgaatagccgccagccgaatcaatagcgtcacgaccatgcccatcatactggctgtttccagtggtacggaaaatgtgtaataagccgtagcgtggacaataccgccgataatacaggcagttgcgtagatttctgtacgtaaaatcatggggatttcgcgggccagaacatcacgaatgatcccgccgccaacgccagtaatgacgcccatacaaaccgcgattaacggaccggcttccgcattaaaggctttattcacgccaatgccgacaaacaccgccagaccaacggcgtccagcaccggcaacatccattttggtaagcgtcttggctggcgcaccagcacgatggtcagcatgctggtgaccattgcaacgaccagatcggtgggatctttcacccaaaataccgggccgtgatccagcgccatgtcgcgaattgtcccgccgcctactgcggttaccacgcccagtaccagaacaccaaaagggtccatacgcaattttccggctaacaaaacgccggagatggcaaataccgctgtgccgactatatccagccaatagacgagcattgttcaatccccactgagcacctgaaaaggtcaggcgctaatctacctgtgaaagcgcattacagagctgttgtgcagcgaggataatacgtgggcttgcacgttcaaaccagtcactcgtgagaggaataacgggaattttgagctgttcaccccagtattgtttgattttaggaatttggtccggtccgcctgtaatgacaatcgcctgtggcgagcgtgctaacacctgttcgcggctaacttgcggccagggaacccggctgtctttaaagatgttttctccgccacaaacttcgagtacctggttctgaatcgactcttttccactggtaaatggcggattaatgccgaattgcagaaaaacacgttttttaggtttatcagcatattgcgctttcaattgcgcgtactgatccagcagggattgcgcggcttgttcggccttgtctggttgcggactccagggggccagttgacgtaacgcattggcaatttgttcaatgcttgtcgcatcgacccacatcacttttattcccagcgaagccagctggtcaacctgccgctcggcattacctccacgccaggcaatcaccagatcgggtttcagcgcgacaatgcgttccagattcatcccctgccaggtggaaacctgctcaatcttttgcgcttgtggaggatagtcggaatagctgctgaccccaaccggcgtgatcccggcggcaaaggcaagttcagtgttggcgggagaaagcgtgatgacgcgcggcgcggcgttgagccacagtggcgcaagaaaagacagggcgaccagcgccctgaacagtgacttagccatgtgcaagtttctgcaccagtgactcaaccatcaggctggactgtttagcggcaacagccaggaactcatcgaagctaagatgagactgttgatcggccacgtcggagatggcgcgtacgacaacaaacgggacgttgaaattgtggcagacatgggcgattgccgtcgcttccatctctacagcaatggcctgtgggaagttgtggcggattttcgccagaccaacagaaccgttgatgaaagcgtcgccgctaacaatcaggccacgtacagcgttaagattcagttcggcaatgcaggcctcagcggcagcgatcagtttatcgtcagctttaaagcctgccggacagcctggtaactgaccgtattcataaccaaatgccgtgacatccgcgtcgtgataacgtgcttcgtccgagacaacgatatcgcccactttcaacgttggtgccaggccaccggcagaaccggtgttaataatcacatctggcttgcagtgttccaacagcaaagtggcacccagcgccgcagcgactttaccgatgcccgatttcagaagcgcaacctcggttccattcagttggccggtatagatttcgcaaccgccgagactgatagtttgacggttttcgattttgtcacgcagcagcgtaacttcttcttccattgcaccaatgatgccgattttcatagatttactcgcgataagcccgatttgaaggcatagtttaccatgcgcttacggggaagcgtatttctcacgcgggagaggacatggcacagattgatttccgaaaaaaaataaactggcatcgtcgttaccgttcaccgcagggcgttaaaaccgaacatgagatcctgcggatcttcgagagcgatcgcgggcgtatcatcaactctccggcaattcgtcgtctgcaacaaaagacccaggtttttccactggagcgcaatgccgccgtgcgcacgcgtcttacccactcgatggaagtccagcaggtggggcgctacatcgccaaagaaattttaagccgtctgaaagagcttaaattactggaagcatacggcctggatgaactgaccggtccctttgaaagcattgttgagatgtcatgcctgatgcacgatatcggcaatccgccgtttggtcattttggcgaagcggcgataaatgactggtttcgccaacgtttgcacccggaagatgccgaaagccagcctctgactgacgatcgctgcagcgtggcggcactacgtttacgggacggggaagaaccgcttaacgagctgcggcgcaagattcgtcaggacttatgtcattttgaggggaatgcacaaggcattcgcctggtgcatacattgatgcggatgaatctcacctgggcacaggttggcggtattttaaaatatacccgtccggcgtggtggcgtggcgaaacgcctgagacacatcactatttaatgaaaaagccgggttattatctttctgaagaagcctatattgcccggttgcgtaaagaacttaatttggcgctttacagtcgttttccattaacgtggattatggaagctgccgacgacatctcctattgtgtggcagaccttgaagatgcggtagagaaaagaatatttaccgttgagcagctttatcatcatttgcacgaagcgtggggccagcatgagaaaggttcgctcttttcgctggtggttgaaaatgcctgggaaaaatcacgctcaaatagtttaagccgcagtacggaagatcagttttttatgtatttacgggtaaacaccctaaataaactggtaccctacgcggcacaacgatttattgataatctgcctgcgattttcgccggaacgtttaatcatgcattattggaagatgccagcgaatgcagcgatcttcttaagctatataaaaatgtcgctgtaaaacatgtgtttagccatccagatgtcgagcggcttgaattgcagggctatcgggtcattagcggattattagagatttatcgtcctttattaagcctgtcgttatcagactttactgaactggtagaaaaagaacgggtgaaacgtttccctattgaatcgcgcttattccacaaactctcgacgcgccatcggctggcctatgtcgaggctgtcagtaaattaccgtcagattctcctgagtttccgctatgggaatattattaccgttgccgcctgctgcaggattatatcagcggtatgaccgacctctatgcgtgggatgaataccgacgtctgatggccgtagaacaataaccaggcttttgtaaagacgaacaataaatttttaccttttgcagaaactttagttcggaacttcaggctataaaacgaatctgaagaacacagcaattttgcgttatctgttaatcgagactgaaatacatgaaaaaaaccacattagcactgagtgcactggctctgagtttaggtttggcgttatctccgctctctgcaacggcggctgagacttcttcagcaacgacagcccagcagatgccaagccttgcaccgatgctcgaaaaggtgatgccttcagtggtcagcattaacgtagaaggtagcacaaccgttaatacgccgcgtatgccgcgtaatttccagcagttcttcggtgatgattctccgttctgccaggaaggttctccgttccagagctctccgttctgccagggtggccagggcggtaatggtggcggccagcaacagaaattcatggcgctgggttccggcgtcatcattgatgccgataaaggctatgtcgtcaccaacaaccacgttgttgataacgcgacggtcattaaagttcaactgagcgatggccgtaagttcgacgcgaagatggttggcaaagatccgcgctctgatatcgcgctgatccaaatccagaacccgaaaaacctgaccgcaattaagatggcggattctgatgcactgcgcgtgggtgattacaccgtagcgattggtaacccgtttggtctgggcgagacggtaacttccgggattgtctctgcgctggggcgtagcggcctgaatgccgaaaactacgaaaacttcatccagaccgatgcagcgatcaaccgtggtaactccggtggtgcgctggttaacctgaacggcgaactgatcggtatcaacaccgcgatcctcgcaccggacggcggcaacatcggtatcggttttgctatcccgagtaacatggtgaaaaacctgacctcgcagatggtggaatacggccaggtgaaacgcggtgagctgggtattatggggactgagctgaactccgaactggcgaaagcgatgaaagttgacgcccagcgcggtgctttcgtaagccaggttctgcctaattcctccgctgcaaaagcgggcattaaagcgggtgatgtgatcacctcactgaacggtaagccgatcagcagctttgccgcactgcgtgctcaggtgggtactatgccggtaggcagcaaactgaccctgggcttactgcgcgacggtaagcaggttaacgtgaacctggaactgcagcagagcagccagaatcaggttgattccagctccatcttcaacggcattgaaggcgctgagatgagcaacaaaggcaaagatcagggcgtggtagtgaacaacgtgaaaacgggcactccggctgcgcagatcggcctgaagaaaggtgatgtgattattggcgcgaaccagcaggcagtgaaaaacatcgctgaactgcgtaaagttctcgacagcaaaccgtctgtgctggcactcaacattcagcgcggcgacagcaccatctacctgttaatgcagtaatctccctcaaccccttcctgaaaacgggaaggggttctccttacaatctgtgaacttcaccacaactccatacatcttcatcatcctttaggcatttgcacaatgccgtacgttacgtacttccttatgctaagccgtgcataacggaggacttatggctggctggcatcttgataccaaaatggcgcaggatatcgtggcacgtaccatgcgcatcatcgataccaatatcaacgtaatggatgcccgtgggcgaattatcggcagcggcgatcgtgagcgtattggtgaattgcacgaaggtgcattgctggtactttcacagggacgagtcgtcgatatcgatgacgcggtagcacgtcatctgcacggtgtgcggcaggggattaatctaccgttacggctggaaggtgaaattgtcggcgtaattggcctgacaggtgaaccagagaatctgcgtaaatatggcgaactggtctgcatgacggctgaaatgatgctggaacagtcgcggttgatgcacttgttggcgcaggatagccgtttgcgggaagaactggtgatgaacctgattcaggcagaggagaatactcccgcacttactgaatgggcgcaacggctggggatcgatctcaatcaaccgcgagtggtggctattgttgaggtcgacagcggtcagcttggcgtggacagcgcaatggcggagttacaacaactgcaaaacgcgctgactacgcccgagcgtaataatctggtggcgattgtctcgctaaccgaaatggtggtgttgaaaccggcgttgaactcttttgggcgctgggatgcagaagatcatcgtaagcgagttgaacaactgattacccgcatgaaagagtacggccagctgcgttttcgcgtttcactgggcaactattttaccggtcctggcagtattgcccgatcctatcgtacggcgaaaacgacgatggtggtgggtaaacagcggatgccagaaagtcgctgctatttttatcaggatctgatgttacctgtgttactcgacagtttgcgtggcgactggcaggccaacgaactggcgcgaccgctggcgcggctgaaaacgatggacaataacggcttgctgcgacgaacgctggcggcgtggtttcgccacaatgtgcaaccgctggcaacgtcaaaggcgttgtttattcatcgtaataccctggagtatcggcttaatcgtatatcggaactgaccgggcttgatttgggcaattttgatgacaggttgctgctgtatgtggcgttacaactggatgaagagcggtaggttatgcgttaaggttgaggcggcgctggctcattcccctcagcccgaagggtagaggggaatgcccgaattaaccgtcagttcgggattatttacgcgttagtttttccagatcggcttcaatctcgctgatcttattggttacgactgactccaggtgacgtaagtcgtcgaggatcttacgcttaagatcaacttcgctgcggtcacgctggcagatttgatcaagctcatcaatgatataccgtagattcgggctgatttcctggacttctttataaccctgacccacaccatcagcgacgaccgttttacgctgacgcggatatttaaacttaacgctcttggcgaaaaactcgcctttgtctttctggaaatagattttcagaatatcgttgttggcttcctgccggaggctgtaacgatcaatttcttcaggattggtaatacccagacttttcagattgtcgtacatagcgttacctcaaaatgagtcagtaaattgtgcttattttagcatttggcctggcccgcccggctcgactgtgatcgcagaaagcctttttcttccagacttctatcatggcgtaaaaatcaaaaaattacctgctttattctggtgataaaattcacgatctacaccagttccagcatcgttacttccgggcggcagttcagacgcaaaccatacaaactgcccacgccacgggttgtgtagatgtgtctttcgccaaaggcatttaatccggcgacgtaacgtttatcttcgacaggggcaaaaggttcaccaaccaacggtacgcgcagttgcccgccgtgagtatggccgcacagcatcagatcccagggttcatcacgcatgacttctttgctgtcgggattatgcgccagcaccagtcttggcagattggcttcgctggcgggaggcggtttgcattgtccggcccataagtcaccagtgcctaccagttcgaattgcctgttcggcgtggcgatcaccgtagcctggttaaacaacaccgtgatgcccgctgatttcaacgtctcgccaattaagtgatttttttctgtaccaacagggcgatcgtggttgccgaagcaggcaaacgtcggcgcacattcggcaaggggggagagtacgtcactaaacgccgaaaaattcagcgacatatcaaataatacgtaatcgccgcccagtaatatcaaatcgggcttttgttctatgccaagagcaatcgcgtcagaaatcaggcttaaaggaacaaaacgagagtaatggagatcggccagaaaaagaattttgaatggtgctgcgttgtctttaaaaaaggcgaggcggtgacggattaattcaaaccagcctggctcacagtaatgcatataaccgaaacctgagctcgtggctatcgtcgcggcagtagcctgcaaaaatcggcggcgtgaaatcatcgctcatccctgcaaaaaaatcgggcagcgtcgtgctgcccgtgtgcatacttttagtcgatggtacgcagcagttcgttaatgccgactttgccgcgagttttcgcgtcaactttcttaacgataaccgcacagtagaggctgtatttgccatcttttgacggcagattacctgaaacaaccacagaccccgccggaacgcgaccgtagtggatttcgccggtttcacggtcgtaaatacgggtgctctgaccaatgtatacgcccatggaaatgacggaaccttcttcgacaatcaccccttcaaccacttcagagcgcgcgccgatgaagcaattatcttcaatgatggttgggttagcctgcagcggttccagcacgccgccgatgcccacgccaccggaaaggtggacgtttttaccaatctgcgcacaagaaccgacggtcgcccaggtatcaaccatggtgccttcatcaacatatgcgccgatgttgacgtaagacggcatcagcacggtgttacgggcaataaacgcaccctgacgtaccgccgctggtggcacaacgcggaagccttctttctggaaacgtgcttcgtcgtagtcggcgaatttcatcggcactttgtcgaagtagcggctttctgccccttcgatcacctgattatcattaatacggaaagagagcagcaccgcttttttcaaccactgatgcgtcacccactgaccgtcaattttttccgctacacgcagtgcgccggaatccagcagggcgatcacctgatttaccgcttcgcgggtaacggtgtctgcattggctggcgtgatctcggcacggcgttcaaaagcggtttcaataatgttctgtaactgctgcattgttaaactcttttcatatcagtaaacacatcaccctttatcgtttggattgagggcctctgtcaaccgctgatgcacttcctgctgcaactcgttattaagcgcacgccggtcagcggtggcaattatgaataaatcttctactcgctcgccaatggttgtaattcgggcaccatgaagcgaaattcccagatcggcaaaaattttcccgactcgcgccagcagtccaggttggtcgagggcgatcagttcgaggaacgatttgcggtcggtatgggtcggcaaaaacgttacttcggtttcaacagtaaaatggcgtaatttggcgggttggcgacggggctgcggtggctgccagctactttgcgtcagtacttgctccagaccaaaccgaataacctcatgacgatctgcggacagcgggttgccatcgggttccagcacgataaaggtatccatcgccataccgtcgcgagtggtgaaaatttgtgcgtcgtgaacacttaaattgcggcggtctaattcggcacagacggcggcaaacagataagggcggtccgggctccagataaaaatctcggtgcctccacgcgtagcctgcgggctaagcaataccagcggtttgcttaaatcatgctgtaataaatggcgggcatgccaggccagttgatttgggctatggcggacaaaatagttagcacgacagcgtgaccaaatttggtgcagcgcctcttcgtcgatgttatccatgcgcagtagtgccagtgcctggagttggtgatggcgaacccgttcgcgcatatccggcgtgttttgcattccgcgtcgtagctgcttttcggtggcaaagtagagctcacgcaacagactttgcttccagctattccacagcgtttcgttggtggcgcaaatgtcagccacagtcaggcataccagatagcgcagacgattttccgtttgcacttcttcggcaaactgcttgatgacttccgggtcctgaatatcgcggcgttgggcggtcaccgacatcaacaggtgctggcgaaccagccaggcgaccagctgtgtttcgcgtgagttcagcccgtggagttcggcaaaatgcactacatcctgagcaccgagaatggagtggtcgccgccgcgtcctttggcgatatcgtgaaacagcgcggcgatgaaaatcagctcagttgacggcaggcgcggccagacgtccacacacaacggatggcgctggcgcgtttcttcactggcaaaactctccagtttcagcatcacgcggatagtatgttcatccaccgtgtaggcgtggaacagatcaaactgcatctgcccgacgatatgcgaccattgcggcatatacgcgccgagcacgctatggcgatgcattggcaatagcccgcgccgcaccgctccggggtgacgcagaatgctcaaaaacagttttcgtgcttccggaatattacacagcggttgttgcagatggcgacgggcatggcgtaactggcgcagcgtggtggagtaaatgccggtgatcgcactgttgtgcaccatggtgtagaacatacgcaagatggcttccggctggcgcataaatagtgtttcatcacgcaggtcgattagcgtaccgcgtagctgaaactcatcgtcgattggacgtggtttttcgtcggcgggaagggcgaggatggcttcatcgaacagttgcagcagcatctggttgagttcactgacgcggcgtgtaacgcggaagtaatccttcatcatccgctcgaccggttcgttaccttcaccactgtaattcagacgctgggcgacgctaagctggcgatcgaataacaggcgattatcgtaacggctgacgaccagatgcagggcaaagcgaatacgccacaatatatgcagacattcgtttaattccgcccgctccgctgaggttaagaagccaaacccgaccatttcatccagcgatgttgcgccaaaatgacggcgggccacccattgcagagtgtggatatcgcgcaagccgccagggctgcttttgatgtctggttcaaggttgtagctggtgccatggtaacgctgatggcgctggttctgttcttcaactttcgccgcgtagaacttgtcggaaggccagaatccttcgctgaaaatatgtttttgcagttcgaggaacagcgcaacatcgccaattaataagcgggattcgattaaattggtggcgacggttaaatccgataacccttccagcatgcactcttcaagcgtgcgcacgctatgaccgacttccagctttacatcccagagcagcgttaacagctcgcccactttttgcgcctgatcgtccgggagctttttacggcttaaaatcagtaaatcgacgtctgaaagtggatgcagctcgccacgaccgtagccaccgacggcgaccaatgccaggtcggcaatctggctgaatcccgcttcaatccataatcgttgcaggagctggtcgataaactcggtgcgcgcctcaatcaactgttctgcagagatcccattgtcaaaggcatcacccagccaacgctggaaagtatcgatatgggcttttatcccaccgacggttaattcatcacggggccagacgcatggattttgcggttgaccgggcagggtggggagagcggtgtttgcgtactgttctggaagggtattcattgtgcgccacccataagattaaattatcgcattaaaaaagccggcattcgccggcttcatcttattcgtcgtgcgagattatcgccgggatggtgtcatccttgcgtagcgtcagaatttcgcagccgttatcagtcaccacaatagtatgctcatattgtgcagacaagctgcgatctttggtttttaccgtccagccatctttcatggtgcggatctcttttttacccgcgttgaccattggctcgatggtgaacgtcatcccaggtttcagtacgacgttggtttcacgggagtcatagtgcagcacctgcggttcttcatggaagccgcgaccaataccgtgtccgcaatattcacgaacgacggagaagccttctgcttcgacaaatttctgaatcgccgcaccgatttcgcgcagattaatgcctggttttaccatgcgtagcgccaggtacaggctttcttgcgtgatgcggcacagacgttcgcccatgatggtcggcttaccgacgataaacattttcgaggtatcgccgtggaaaccatctttgattacggtgacatcaatgttaacgatatcgccatctttcagcagcttagcatcgtccgggataccgtggcacaccacttcattaatagagatgcaaacggatttcggatagccgtgatagccgaggcaggcagaaaccgcgtgttgttcattaacaatgtaatcattacagatgcgatccagctcgccggtgctgacgcccggtttaacatacggttcgatcatctccagcacttcggcagccagtcggccagcgacgcgcattttttcgatatcttctggggtcttgattgagatagccattaattctgtccatcagcgtcggtgataccgacaatatatatgtaagtgccgtcaatggtatcacacccgggcaaattgagaatcattctgaatttcgccaaacgtgccactgaaggttttctataatagaaaattcgacgtctgatgctgtacacagcgccaacaattattggtgtccacgacgtatttgtggtataaagcgcgccggacttccgatccatttcgtatacacagactggacggaagcgacaatctcactttgtgtaacaacacacacgtatcggcacatattccggggtgccctttggggtcggtaatatgggatacgtggaggcataaccccaacttttatatagaggttttaatcatggcaactgtttccatgcgcgacatgctcaaggctggtgttcacttcggtcaccagacccgttactggaacccgaaaatgaagccgttcatcttcggtgcgcgtaacaaagttcacatcatcaaccttgagaaaactgtaccgatgttcaacgaagctctggctgaactgaacaagattgcttctcgcaaaggtaaaatccttttcgttggtactaaacgcgctgcaagcgaagcggtgaaagacgctgctctgagctgcgaccagttcttcgtgaaccatcgctggctgggcggtatgctgactaactggaaaaccgttcgtcagtccatcaaacgtctgaaagacctggaaactcagtctcaggacggtactttcgacaagctgaccaagaaagaagcgctgatgcgcactcgtgagctggagaaactggaaaacagcctgggcggtatcaaagacatgggcggtctgccggacgctctgtttgtaatcgatgctgaccacgaacacattgctatcaaagaagcaaacaacctgggtattccggtatttgctatcgttgataccaactctgatccggacggtgttgacttcgttatcccgggtaacgacgacgcaatccgtgctgtgaccctgtacctgggcgctgttgctgcaaccgtacgtgaaggccgttctcaggatctggcttcccaggcggaagaaagcttcgtagaagctgagtaataaggcttgataactcccccaaaatagttcgagttgcagaaaggcggcaagctcgagaattcccgggagcttacatcagtaagtgaccgggatgagcgagcgaagataacgcatctgcggcgcgaaatatgaagggggagagcccttatagaccaggtagtacacgtttggttagggggcctgcatatggccccctttttcacttttatatctgtgcggtttaatgccgggcagatcacatctccgaggattttagaatggctgaaattaccgcatccctggtaaaagagctgcgtgagcgtactggcgcaggcatgatggattgcaaaaaagcactgactgaagctaacggcgacatcgagctggcaatcgaaaacatgcgtaagtccggtgctattaaagcagcgaaaaaagcaggcaacgttgctgctgacggcgtgatcaaaaccaaaatcgacggcaactacggcatcattctggaagttaactgccagactgacttcgttgcaaaagacgctggtttccaggcgttcgcagacaaagttctggacgcagctgttgctggcaaaatcactgacgttgaagttctgaaagcacagttcgaagaagaacgtgttgcgctggtagcgaaaattggtgaaaacatcaacattcgccgcgttgctgcgctggaaggcgacgttctgggttcttatcagcacggtgcgcgtatcggcgttctggttgctgctaaaggcgctgacgaagagctggttaaacacatcgctatgcacgttgctgcaagcaagccagaattcatcaaaccggaagacgtatccgctgaagtggtagaaaaagaataccaggtacagctggatatcgcgatgcagtctggtaagccgaaagaaatcgcagagaaaatggttgaaggccgcatgaagaaattcaccggcgaagtttctctgaccggtcagccgttcgttatggaaccaagcaaaactgttggtcagctgctgaaagagcataacgctgaagtgactggcttcatccgcttcgaagtgggtgaaggcatcgagaaagttgagactgactttgcagcagaagttgctgcgatgtccaagcagtcttaattatcaaaaaggagccgcctgagggcggcttctttttgtgcccatcttgtaaattcagctaacccttgtggggctgcgctgaaaagcgacgtacaatgtcgctagtattaattcatttcaatcgttgacagtctcaggaaagaaacatggctaccaatgcaaaacccgtctataaacgcattctgcttaagttgagtggcgaagctctgcagggcactgaaggcttcggtattgatgcaagcatactggatcgtatggctcaggaaatcaaagaactggttgaactgggtattcaggttggtgtggtgattggtgggggtaacctgttccgtggcgctggtctggcgaaagcgggtatgaaccgcgttgtgggcgaccacatggggatgctggcgaccgtaatgaacggcctggcaatgcgtgatgcactgcaccgcgcctatgtgaacgctcgtctgatgtccgctattccattgaatggcgtgtgcgacagctacagctgggcagaagctatcagcctgttgcgcaacaaccgtgtggtgatcctctccgccggtacaggtaacccgttctttaccaccgactcagcagcttgcctgcgtggtatcgaaattgaagccgatgtggtgctgaaagcaaccaaagttgacggcgtgtttaccgctgatccggcgaaagatccaaccgcaaccatgtacgagcaactgacttacagcgaagtgctggaaaaagagctgaaagtcatggacctggcggccttcacgctggctcgtgaccataaattaccgattcgtgttttcaatatgaacaaaccgggtgcgctgcgccgtgtggtaatgggtgaaaaagaagggactttaatcacggaataattcccgtgatggataaataagggtaagattccgcgtaagtatcgcgggggcgtaagtctggttataaggcgttattgttgcaggcagtttggtcacggccagcgcgcagcaaccggagcgtacaaaagtacgtgaggatggcgagcactgcccggggccaaaatggcaaataaaatagcctaataatccagacgattacccgtaatatgtttaatcagggctatacttagcacacttccactgtgtgtgactgtctggtctgactgagacaagttttcaaggattcgtaacgtgattagcgatatcagaaaagatgctgaagtacgcatggacaaatgcgtagaagcgttcaaaacccaaatcagcaaaatacgcacgggtcgtgcttctcccagcctgctggatggcattgtcgtggaatattacggcacgccgacgccgctgcgtcagctggcaagcgtaacggtagaagattcccgtacactgaaaatcaacgtgtttgatcgttcaatgtctccggccgttgaaaaagcgattatggcgtccgatcttggcctgaacccgaactctgcgggtagcgacatccgtgttccgctgccgccgctgacggaagaacgtcgtaaagatctgaccaaaatcgttcgtggtgaagcagaacaagcgcgtgttgcagtacgtaacgtgcgtcgtgacgcgaacgacaaagtgaaagcactgttgaaagataaagagatcagcgaagacgacgatcgccgttctcaggacgatgtacagaaactgactgatgctgcaatcaagaaaattgaagcggcgctggcagacaaagaagcagaactgatgcagttctgatttcttgaacgacaaaaacgccgctcagtagatccttgcggatcggctggcggcgttttgctttttattctgtctcaactctggatgtttcatgaagcaactcaccattctgggctcgaccggctcgattggttgcagcacgctggacgtggtgcgccataatcccgaacacttccgcgtagttgcgctggtggcaggcaaaaatgtcactcgcatggtagaacagtgcctggaattctctccccgctatgccgtaatggacgatgaagcgagtgcgaaacttcttaaaacgatgctacagcaacagggtagccgcaccgaagtcttaagtgggcaacaagccgcttgcgatatggcagcgcttgaggatgttgatcaggtgatggcagccattgttggcgctgctgggctgttacctacgcttgctgcgatccgcgcgggtaaaaccattttgctggccaataaagaatcactggttacctgcggacgtctgtttatggacgccgtaaagcagagcaaagcgcaattgttaccggtcgatagcgaacataacgccatttttcagagtttaccgcaacctatccagcataatctgggatacgctgaccttgagcaaaatggcgtggtgtccattttacttaccgggtctggtggccctttccgtgagacgccattgcgcgatttggcaacaatgacgccggatcaagcctgccgtcatccgaactggtcgatggggcgtaaaatttctgtcgattcggctaccatgatgaacaaaggtctggaatacattgaagcgcgttggctgtttaacgccagcgccagccagatggaagtgctgattcacccgcagtcagtgattcactcaatggtgcgctatcaggacggcagtgttctggcgcagctgggggaaccggatatgcgtacgccaattgcccacaccatggcatggccgaatcgcgtgaactctggcgtgaagccgctcgatttttgcaaactaagtgcgttgacatttgccgcaccggattatgatcgttatccatgcctgaaactggcgatggaggcgttcgaacaaggccaggcagcgacgacagcattgaatgccgcaaacgaaatcaccgttgctgcttttcttgcgcaacaaatccgctttacggatatcgctgcgttgaatttatccgtactggaaaaaatggatatgcgcgaaccacaatgtgtggacgatgtgttatctgttgatgcgaacgcgcgtgaagtcgccagaaaagaggtgatgcgtctcgcaagctgaggataatccggctacagagagtcgcgctatttgttagcgtagggcttcagtgatatagtctgcgccatctgatcgtaagtagttggctttataaggtcagatatgccgtggttttacacggcttttttttgtataggcttcagtattcctgagtaccgtaaaccctgtcagggaataaaaaacgcgtgatgttgtctgctactcaaccacttagcgaaaaattgccagcgcatggctgccgtcatgttgcgatcattatggacggcaatggccgctgggcaaaaaagcaagggaagattcgtgcctttgggcataaagccggggcaaaatccgtccgccgggctgtctcttttgcggccaacaacggtattgaggcgttaacgctgtatgcctttagtagtgaaaactggaaccgaccagcgcaggaagtcagtgcgttaatggaactgtttgtgtgggcgctcgatagcgaagtaaaaagtctgcaccgacataacgtgcgtctgcgtattattggcgataccagtcgctttaactcgcgtttgcaagaacgtattcgtaaatctgaagcgctaacagccgggaataccggtctgacgctgaatattgcggcgaactacggtggacgttgggatatagtccagggagtcaggcaactggctgaaaaggtgcagcaaggaaacctgcaaccagatcagatagatgaagagatgctaaaccagcatgtctgtatgcatgaactggcccctgtagatttagtaattaggactgggggggagcatcgcattagtaactttttgctttggcaaattgcctatgccgaactttactttacagatgttctctggcccgatttcgatgaacaagactttgaaggggcgttaaatgcctttgctaatcgagagcgtcgtttcggcggcaccgagcccggtgatgaaacagcctgatgggggtcgcttttgctgaagtatcgcctgatatctgcttttgtgttaatacccgtcgtcatcgcggcgttgtttctgttgccgccggtggggttcgccattgtaacgctggtggtctgcatgctggcagcgtgggaatggggacagcttagcggttttaccactcgttcgcagcgagtatggttggcggtgttatgcgggttattgttggcgctgatgctttttctgttgccggaatatcaccgaaatattcatcaaccgctggttgaaatctcactttgggcttcgctgggttggtggattgtcgcgctattgctggtgctgttttacccaggttccgcagcaatctggcgtaactctaaaacattgcgccttatttttggcgtgctaaccattgttcccttcttctggggcatgctggcgttacgggcctggcactatgacgagaatcattacagtggcgcaatatggctgctctatgtcatgatcctggtatggggcgctgactccggcgcatatatgtttggcaaattgtttggtaaacataagctggcaccgaaggtttctccgggtaaaacctggcaaggctttatcggtggactcgctactgcagcggtaatctcatggggttatggcatgtgggcgaatctcgacgtcgctcccgtcaccttactcatttgctctattgtcgcagcgttagcctcagtgctcggcgatctgaccgagagtatgtttaagcgtgaagcaggaattaaggacagcggtcatttaattccaggacacggtggtattttagatcgtattgatagcctgacggctgcggtaccggtctttgcttgcttgttgttactggtattcaggacgctttaacggaaggtaatatgctgagttttctctgggatttggcttcgttcatcgttgcactgggtgtacttatcaccgtgcatgaatttggtcatttctgggttgcccggcgttgtggtgttcgcgttgagcgtttctcaatagggtttggtaaggcgctctggcggcgaactgataagctcggcaccgaatatgttatcgccctgatcccgttgggcggttatgtcaaaatgctggatgagcgcgcagaaccggtcgttccggaactccgccaccatgccttcaataataaatctgtcggccaacgagcggcgattattgccgcaggtccggttgcaaacttcatttttgctatctttgcctactggctggtttttattattggtgtgcctggcgtacgtccggtggttggcgaaatagcagccaattcgatagctgcggaagcacaaattgcaccaggtacggaactaaaagccgtagatggtatcgaaacgcctgattgggatgccgtgcgtttgcagttggtcgataaaattggcgatgaaagcaccaccattacagtagcgccatttggcagcgaccaacggcgggatgtaaagctcgatttacgtcactgggcgtttgagcctgataaagaagatccggtatcttcgctggggattcgtcctcgtgggccgcaaattgaacctgtactggaaaatgtgcagccaaactcggcggcaagcaaggcaggtttgcaagcaggcgacaggatcgttaaagtcgatggtcagcccttaacgcagtgggtgacctttgtgatgcttgtccgggataacccgggtaaatccttagcgttagaaatcgaaaggcaggggagtcccttgtctttgacattaatcccggagagtaaaccgggtaatggtaaagcgattggttttgtcggtattgagccgaaagtcattcctttgccagatgagtataaagttgtacgccagtatgggccgttcaacgccatcgtcgaagccacggacaaaacgtggcagctgatgaagctgacggtcagtatgctgggaaaattgatcaccggtgatgtgaaactgaacaacctcagtgggccgatctctatcgccaagggggctgggatgacagcggaactcggggttgtttattacctgccgtttcttgcgcttattagcgtgaacttagggataattaacctgtttccgttgcccgtacttgacggggggcatctgctgttccttgcgatcgaaaagatcaagggcggaccggtatccgagcgggttcaagacttttgttatcgcattggctcgattctgctggtgctgttaatggggcttgcacttttcaatgatttctctcggttatgagagttagttaggaagaacgcataataacgatggcgatgaaaaagttgctcatagcgtcgctgctgtttagcagcgccaccgtatacggtgctgaagggttcgtagtgaaagatattcatttcgaaggccttcagcgtgtcgccgttggtgcggccctcctcagtatgccggtgcgcacaggcgacacggttaatgatgaagatatcagtaataccattcgcgctctgtttgctaccggcaactttgaggatgttcgcgtccttcgtgatggtgatacccttctggttcaggtaaaagaacgtccgaccattgccagcattactttctccggtaacaaatcggtgaaagatgacatgctgaagcaaaacctcgaggcttctggtgtgcgtgtgggcgaatccctcgatcgcaccaccattgccgatatcgagaaaggtctggaagacttctactacagcgtcggtaaatatagcgccagcgtaaaagctgtcgtgaccccgctgccgcgcaaccgtgttgacctaaaactggtgttccaggaaggtgtgtcagctgaaatccagcaaattaacattgttggtaaccatgctttcaccaccgacgaactgatctctcatttccaactgcgtgacgaagtgccgtggtggaacgtggtaggcgatcgtaaataccagaaacagaaactggcgggcgaccttgaaaccctgcgcagctactatctggatcgcggttatgcccgtttcaacatcgactctacccaggtcagtctgacgccagataaaaaaggtatttacgtcacggtgaacatcaccgaaggcgatcagtacaagctttctggcgttgaagtgagcggcaaccttgccgggcactccgctgaaattgagcagctgactaagatcgagccgggtgagctgtataacggcaccaaagtgaccaagatggaagatgacatcaaaaagcttctcggtcgctatggttatgcctatccgcgcgtacagtcgatgcccgaaattaacgatgccgacaaaaccgttaaattacgtgtgaacgttgatgcgggtaaccgtttctacgtgcgtaagatccgttttgaaggtaacgatacctcgaaagatgccgtcctgcgtcgcgaaatgcgtcagatggaaggtgcatggctggggagcgatctggtcgatcagggtaaggagcgtctgaatcgtctgggcttctttgaaactgtcgataccgatacccaacgtgttccgggtagcccggaccaggttgatgtcgtctacaaggtaaaagagcgcaacaccggtagcttcaactttggtattggttacggtactgaaagtggcgtgagcttccaggctggtgtgcagcaggataactggttaggtacaggttatgctgttggtatcaacgggaccaaaaacgattaccagacctatgctgaactgtcggtaaccaacccgtacttcaccgtagatggcgtaagcctcggtggtcgtctcttctataatgacttccaggcagatgacgccgacctgtccgactataccaacaagagttatggtacagacgtgacgttgggcttcccgattaacgaatataactcgctgcgtgcaggtctgggttatgtacataactccctgtccaacatgcagcctcaggttgcgatgtggcgttatctgtactctatgggtgaacatccgagcacctctgatcaggataacagcttcaaaacggacgacttcacgttcaactatggttggacctataacaagcttgaccgtggttacttcccgacagatggttcacgtgtcaacctgaccggtaaagtgaccattcctggatcggataacgaatactacaaagtgacgttagacacggcgacttatgtgccgatcgatgacgatcacaaatgggttgttctggggcgtacccgctggggttatggtgatggtttaggcggcaaagagatgccgttctacgagaacttctatgccggtggttccagcaccgtgcgtggcttccagtccaataccattggtccgaaagcagtttacttcccgcatcaggccagtaattatgatccggactatgattacgaatgtgcgactcaggacggcgcgaaagacctgtgtaaatcggatgatgctgtaggcggtaacgccatggcggttgccagcctcgagttcatcaccccgacgccgtttattagcgataagtatgctaactcggttcgtacttccttcttctgggatatgggtaccgtttgggatacaaactgggattccagccaatattctggatatccggactatagtgatccaagcaatatccgtatgtctgcgggtatcgcattacaatggatgtccccattggggccgttggtgttctcctacgcccagccgttcaaaaagtacgatggagacaaggcagaacagttccagtttaacatcggtaaaacctggtaagtgttctccacaaaggaatgtagtggtagtgtagcgatgactttaggcgatcaatataagatcgccgggccacgcaaagaactgcaccctccggtgcaaatgggatggtaaggagtttattgtgaaaaagtggttattagctgcaggtctcggtttagcactggcaacttctgctcaggcggctgacaaaattgcaatcgtcaacatgggcagcctgttccagcaggtagcgcagaaaaccggtgtttctaacacgctggaaaatgagttcaaaggccgtgccagcgaactgcagcgtatggaaaccgatctgcaggctaaaatgaaaaagctgcagtccatgaaagcgggcagcgatcgcactaagctggaaaaagacgtgatggctcagcgccagacttttgctcagaaagcgcaggcttttgagcaggatcgcgcacgtcgttccaacgaagaacgcggcaaactggttactcgtatccagactgctgtgaaatccgttgccaacagccaggatatcgatctggttgttgatgcaaacgccgttgcttacaacagcagcgatgtaaaagacatcactgccgacgtactgaaacaggttaaataagtaatgccttcaattcgactggctgatttagcgcagcagttggatgcagaactacacggtgatggcgatatcgtcatcaccggcgttgcgtccatgcaatctgcacaaacaggtcacattacgttcatggttaacccaaaataccgtgagcatttaggcttgtgccaggcgtccgcggttgtcatgacccaggacgatcttcctttcgcgaaaagtgccgcactggtagtgaagaatccctacctgacttacgcgcgcatggcgcaaattttagataccacgccgcagcccgcgcagaacattgcacccagtgcggtgatcgacgcgacggcgaagctgggtaacaacgtatcgattggcgctaacgcggtgattgagtccggcgttgaactgggcgataacgtgattatcggtgccggttgcttcgtaggtaaaaacagcaaaatcggtgcaggttcgcgtctctgggcgaacgtaaccatttaccatgagatccagatcggtcagaattgcctgatccagtccggaacagtggtaggcgcagacggctttggttatgccaacgatcgtggtaactgggtgaagatcccacagattggtcgcgtaattattggcgatcgcgtggagatcggtgcctgcacaaccatcgatcgcggcgcgctggatgacactattattggcaatggcgtgatcattgataaccagtgccagattgcacataacgtcgtgattggcgacaatacggcggttgccggtggcgtcattatggcgggcagcctgaaaattggtcgttactgcatgatcggcggagccagcgtaatcaacgggcatatggaaatatgcgacaaagtgacggttacgggcatgggtatggtgatgcgtcccatcactgaaccaggcgtctattcctcaggcattccgctgcaacccaacaaagtctggcgcaaaaccgctgcactggtgatgaacattgatgacatgagcaagcgtctgaaatcgcttgagcgcaaggttaatcaacaagactaacgttccatcttttgttcgccaaactttacggcctgtctcattcttacgattgcggcaggccgtgttattattgtcgtttcttatattttgacaggaagagtatcttgactactaacactcatactctgcagattgaagagattttagaacttctgccgcaccgtttcccgttcttactggtggatcgcgtgctggattttgaagaaggtcgttttctgcgcgcagtaaaaaatgtctctgtcaatgagccattcttccagggccatttccctggaaaaccgattttcccgggtgtgctgattctggaagcaatggcacaggcaacaggtattctggcgtttaaaagcgtaggaaaactggaaccgggtgagctgtactacttcgctggtattgacgaagcgcgcttcaagcgcccggtcgtgcctggcgatcaaatgatcatggaagtcactttcgaaaaaacgcgccgcggcctgacccgttttaaaggggttgctctggtcgatggtaaagtagtttgcgaagcaacgatgatgtgtgctcgtagccgggaggcctgatacgtgattgataaatccgcctttgtgcatccaaccgccattgtggaagagggcgcgtcaattggcgcgaacgcacacattggtcctttttgtatcgttggaccccatgtcgaaattggtgagggtaccgtactgaaatctcacgttgtcgtgaatggtcatactaaaattggccgcgataatgagatttatcagttcgcctccatcggcgaagttaaccaggatctgaaatatgctggcgaaccgacccgtgtggaaatcggcgatcgtaaccgcattcgcgaaagcgtcaccattcatcgtggcacagtccagggcggtggattgacgaaggtgggcagcgacaacttactgatgatcaacgcgcacattgcgcacgattgtacggtaggtaaccgctgtattctcgccaacaacgcaacgctggcgggtcacgtatcggttgacgacttcgcgatcatcggcggcatgaccgcagtccatcagttctgcatcattggtgcgcacgtgatggttggcggctgctccggtgtggcgcaggacgtccctccttatgtcattgcgcagggtaaccacgcaacgccgttcggtgtcaatatcgaagggctgaagcgccgcggattcagccgtgaggcgattaccgctatccgcaatgcgtataagctgatttatcgtagcggtaaaacgctcgatgaagtgaaaccggaaattgctgaactggcggaaacatatccggaagtgaaagcctttaccgatttctttgcacgctcaacgcgcggtctgattcgttaatgactgaacagcgtccattaacgattgccctggtcgccggagaaacctccggcgatatcctgggggccggtttaatccgcgctctgaaagaacatgtgcccaacgcccgctttgttggtgttgccgggccacgaatgcaggctgaaggctgcgaagcctggtacgaaatggaagaactggcggtgatgggcattgttgaagtgctcggtcgtctgcgtcgcttactgcatattcgtgccgatctgacaaagcgttttggcgaactgaagccagatgtttttgttggtattgatgcgcctgacttcaatattactcttgaaggtaacctcaaaaagcagggtatcaaaaccattcattacgtcagtccgtcagtctgggcgtggcgacagaaacgtgttttcaaaataggcagagccaccgatctggtgctcgcatttctgcctttcgaaaaagcgttttatgacaaatacaacgtaccgtgccgctttatcggtcataccatggctgatgccatgccattagatccagataaaaatgccgcccgtgatgtgctggggatccctcacgatgcccactgcctggcgttgctaccggggagccgtggtgcagaagttgaaatgcttagtgccgatttcctgaaaacggcccagcttttgcgccagacatatccggatctcgaaatcgtggtgccactggtgaatgccaaacgccgcgagcagtttgaacgcatcaaagctgaagtcgcgccagacctttcagttcatttgctggatgggatgggccgtgaggcgatggtcgccagcgatgcggcgctactggcgtcgggtacggcagccctggagtgtatgctggcgaaatgcccgatggtggtgggatatcgcatgaagccttttaccttctggttggcgaagcggctggtgaaaactgattatgtctcgctgccaaatctgctggcgggcagagagttagtcaaagaattattgcaggaagagtgtgagccgcaaaaactggctgcggcgctgttaccgctgttggcgaacgggaaaaccagccacgcgatgcacgataccttccgtgaactgcatcagcagatccgctgcaatgccgatgagcaggcggcacaagccgttctggagttagcacaatgatcgaatttgtttatccgcacacgcagctggttgcgggtgtggatgaagtcggacgcgggccgttagttggcgcggtcgtcaccgctgcggtgatccttgacccggcgcgcccgattgccgggctgaatgattccaaaaagctgagcgaaaaacgccgtctggcgctctatgaagagatcaaagagaaagcgttgagctggagtctgggccgcgcggaaccccacgaaatcgacgagctgaacattcttcatgcgaccatgctggcgatgcagcgtgccgtcgctgggctgcatattgcgccggaatatgtgttgattgatggtaaccgctgcccgaaattaccgatgcctgcgatggctgtggtgaaaggcgatagccgcgtaccggaaatcagtgccgcgtctatcctggcgaaagtgacgcgtgacgccgaaatggcggcgctggatattgttttcccgcaatatggttttgcccaacacaaagggtacccaaccgcttttcatctggaaaaactggctgaacacggcgcgaccgaacaccatcggcgcagctttgggcctgtcaaacgcgcactgggacttgcgtcctgattcttgtgtcgagattaagtaaaccggaatctgaagatgtctgaaccacgtttcgtacacctgcgggtgcacagcgactactcgatgatcgatggcctggccaaaaccgcaccgttggtaaaaaaggcggcggcgttgggtatgccagcactggcgatcaccgatttcaccaacctttgtggtctggtgaagttctacggagcgggacatggcgcagggattaagcctatcgtcggggcagattttaacgtccagtgcgacctgctgggtgatgagttaacccacctgacggtactggcggcgaacaataccggctatcagaatctgacgttgctgatctcaaaagcgtatcagcgcgggtacggtgccgccgggccgatcatcgatcgcgactggcttatcgaattaaacgaagggttgatccttctttccggcggacgcatgggcgacgtcggacgcagtcttttgcgtggtaacagcgcgctggtagatgagtgtgtcgcgttttatgaagaacacttcccggatcgctattttctcgagctgatccgcaccggcaggccggatgaagaaagctatctgcacgcggcggtggaactggcggaagcgcgcggtttgcccgtcgtggcgaccaacgacgtgcgctttatcgacagcagcgactttgacgcacacgaaatccgcgtcgcgatccacgacggctttaccctcgacgatcctaaacgcccgcgtaactattcgccgcagcaatatatgcgtagcgaagaggagatgtgtgagctgtttgccgacatccccgaagcccttgccaacaccgttgagatcgccaaacgctgtaacgtaaccgtgcgtcttggtgaatacttcctgccgcagttcccgaccggggacatgagcaccgaagattatctggtcaagcgtgcaaaagagggcctggaagagcgtctggcctttttattccctgatgaggaagaacgtcttaagcgccgcccggaatatgacgaacgtctggagactgaacttcaggttatcaaccagatgggcttcccgggctacttcctcatcgttatggaatttatccagtggtcgaaagataacggcgtaccggtagggccaggccgtggctccggtgcgggttcactggtggcctacgcgctgaaaatcaccgacctcgatccgctggaatttgacctgctgttcgaacgtttccttaacccggaacgtgtctccatgcctgacttcgacgttgacttctgtatggagaaacgcgatcaggttatcgagcacgtagcggacatgtacggtcgtgatgcggtatcgcagatcatcaccttcggtacaatggcggcgaaagcggtgatccgcgacgtaggccgcgtgctggggcatccgtacggctttgtcgatcgtatctcgaaactgatcccgcccgatccggggatgacgctggcgaaagcgtttgaagccgagccgcagctgccggaaatctacgaagcggatgaagaagttaaggcgctgatcgacatggcgcgcaaactggaaggggtcacccgtaacgccggtaagcacgccggtggggtggttatcgcgccgaccaaaattaccgattttgcgccgctttactgcgatgaagagggcaaacatccggtcacccagtttgataaaagcgacgttgaatacgccggactggtgaagttcgacttccttggtttgcgtacgctcaccatcatcaactgggcgctggagatgatcaacaagcggcgggcgaagaatggcgagccgccgctggatatcgctgcgatcccgctggatgataagaaaagcttcgacatgctgcaacgctcggaaaccacggcggtattccagcttgaatcgcgcggcatgaaggacctgatcaagcgtctacaacctgactgcttcgaagatatgatcgccctagtggcactgttccgccccggtccgttgcaatcagggatggtggataactttatcgaccgtaaacatggtcgtgaagagatctcctatccggacgtacagtggcagcatgaaagcctgaaaccggtactggagccaacctacggcattatcctgtatcaggaacaggtcatgcagattgcgcaggtgctttctggttataccctcggtggcgcggatatgctgcgtcgtgcgatgggtaagaaaaagccggaagagatggctaagcaacgttctgtatttgctgaaggtgcagaaaagaacggaatcaacgctgaactggcgatgaaaatcttcgacctggtggagaaattcgctggttacggatttaacaaatcgcactctgcggcctatgctttggtgtcatatcaaacgttatggctgaaagcgcactatcctgcggagtttatggcggcggtaatgaccgccgatatggacaacaccgagaaggtggtgggtctggtggatgagtgctggcggatggggctgaaaatcctgccaccagatataaactccggtctttaccatttccacgtcaacgacgacggcgaaatcgtgtatggtattggcgcgatcaaaggggtcggtgaaggtccgattgaggccatcatcgaagcccgtaataaaggcggctacttccgcgaactgtttgatctctgcgcccgtaccgacaccaaaaagttgaaccgtcgcgtgctggaaaaactgatcatgtccggggcgtttgaccgtcttgggccacatcgcgcagcgctgatgaactcgctgggcgatgcgttaaaagcggcagatcaacacgcgaaagcggaagctatcggtcaggccgatatgttcggcgtgctggccgaagagccggaacaaattgaacaatcctacgccagctgccaaccgtggccggagcaggtggtattagatggggaacgtgaaacgttaggcctgtacctgaccggacaccctatcaaccagtatttaaaagagattgagcgttatgtcggaggcgtaaggctgaaagacatgcacccgacagaacgtggtaaagtcatcacggctgcggggctcgttgttgccgcgcgggttatggtcaccaagcgcggcaatcgtatcggtatctgcacgctggatgaccgttccgggcggctggaagtgatgttgtttactgacgccctggataaataccagcaattgctggaaaaagaccgcatacttatcgtcagcggacaggtcagctttgatgacttcagcggtgggcttaaaatgaccgctcgcgaagtgatggatattgacgaagcccgggaaaaatatgctcgcgggcttgctatctcgctgacggacaggcaaattgatgaccagcttttaaaccgactccgtcagtctctggaaccccaccgctctgggacaattccagtacatctctactatcagagggcggatgcacgcgcgcggttgcgttttggcgcgacgtggcgtgtctctccgagcgatcgtttattaaacgatctccgtggcctcattggttcggagcaggtggaactggagtttgactaatacaggaatactatgagtctgaatttccttgattttgaacagccgattgcagagctggaagcgaaaatcgattctctgactgcggttagccgtcaggatgagaaactggatattaacatcgatgaagaagtgcatcgtctgcgtgaaaaaagcgtagaactgacacgtaaaatcttcgccgatctcggtgcatggcagattgcgcaactggcacgccatccacagcgtccttataccctggattacgttcgcctggcatttgatgaatttgacgaactggctggcgaccgcgcgtatgcagacgataaagctatcgtcggtggtatcgcccgtctcgatggtcgtccggtgatgatcattggtcatcaaaaaggtcgtgaaaccaaagaaaaaattcgccgtaactttggtatgccagcgccagaaggttaccgcaaagcactgcgtctgatgcaaatggctgaacgctttaagatgcctatcatcacctttatcgacaccccgggggcttatcctggcgtgggcgcagaagagcgtggtcagtctgaagccattgcacgcaacctgcgtgaaatgtctcgcctcggcgtaccggtagtttgtacggttatcggtgaaggtggttctggcggtgcgctggcgattggcgtgggcgataaagtgaatatgctgcaatacagcacctattccgttatctcgccggaaggttgtgcgtccattctgtggaagagcgccgacaaagcgccgctggcggctgaagcgatgggtatcattgctccgcgtctgaaagaactgaaactgatcgactccatcatcccggaaccactgggtggtgctcaccgtaacccggaagcgatggcggcatcgttgaaagcgcaactgctggcggatctggccgatctcgacgtgttaagcactgaagatttaaaaaatcgtcgttatcagcgcctgatgagctacggttacgcgtaattcgcaaaagttctgaaaaagggtcacttcggtggcccttttttatcgccacggtttgagcaggctatgattaaggaaggattttccaggaggaacacatgaacatcattgccattatgggaccgcatggcgtcttttataaagatgagcccatcaaagaactggagtcggcgctggtggcgcaaggctttcagattatctggccacaaaacagcgttgatttgctgaaatttatcgagcataaccctcgaatttgcggcgtgatttttgactgggatgagtacagtctcgatttatgtagcgatatcaatcagcttaatgaatatctcccgctttatgccttcatcaacacccactcgacgatggatgtcagcgtgcaggatatgcggatggcgctctggttttttgaatatgcgctggggcaggcggaagatatcgccattcgtatgcgtcagtacaccgacgaatatcttgataacattacaccgccgttcacgaaagccttgtttacctacgtcaaagagcggaagtacaccttttgtacgccggggcatatgggcggcaccgcatatcaaaaaagcccggttggctgtctgttttatgattttttcggcgggaatactcttaaggctgatgtctctatttcggtcaccgagcttggttcgttgctcgaccacaccgggccacacctggaagcggaagagtacatcgcgcggacttttggcgcggaacagagttatatcgttaccaacggaacatcgacgtcgaacaaaattgtgggtatgtacgccgcgccatccggcagtacgctgttgatcgaccgcaattgtcataaatcgctggcgcatctgttgatgatgaacgatgtagtgccagtctggctgaaaccgacgcgtaatgcgttggggattcttggtgggatcccgcgccgtgaatttactcgcgacagcatcgaagagaaagtcgctgctaccacgcaagcacaatggccggttcatgcggtgatcaccaactccacctatgatggcttgctctacaacaccgactggatcaaacagacgctggatgtcccgtcgattcacttcgattctgcctgggtgccgtacacccattttcatccgatctaccagggtaaaagtggtatgagcggcgagcgtgttgcgggaaaagtgatcttcgaaacgcaatcgacccacaaaatgctggcggcgttatcgcaggcttcgctgatccacattaaaggcgagtatgacgaagaggcctttaacgaagcctttatgatgcataccaccacctcgcccagttatcccattgttgcttcggttgagacggcggcggcgatgctgcgtggtaatccgggcaaacggctgattaaccgttcagtagaacgagctctgcattttcgcaaagaggtccagcggctgcgggaagagtctgacggttggtttttcgatatctggcaaccgccgcaggtggatgaagccgaatgctggcccgttgcgcctggcgaacagtggcacggctttaacgatgcggatgccgatcatatgtttctcgatccggttaaagtcactattttgacaccggggatggacgagcagggcaatatgagcgaggaggggatcccggcggcgctggtagcaaaattcctcgacgaacgtgggatcgtagtagagaaaaccggcccttataacctgctgtttctctttagtattggcatcgataaaaccaaagcaatgggattattgcgtgggttgacggaattcaaacgctcttacgatctcaacctgcggatcaaaaatatgctacccgatctctatgcagaagatcccgatttctaccgcaatatgcgtattcaggatctggcacaagggatccataagctgattcgtaaacacgatcttcccggtttgatgttgcgggcattcgatactttgccggagatgatcatgacgccacatcaggcatggcaacgacaaattaaaggcgaagtagaaaccattgcgctggaacaactggtcggtagagtatcggcaaatatgatcctgccttatccaccgggcgtaccgctgttgatgcctggagaaatgctgaccaaagagagccgcacagtactcgattttctactgatgctttgttccgtcgggcaacattaccccggttttgaaacggatattcacggcgcgaaacaggacgaagacggcgtttaccgcgtacgagtcctaaaaatggcgggataacttgccagagcggcttccgggcgagtaacgtgctgttaacaaataaaggagacgttatgctgggtttaaaacaggttcaccatattgcgattattgcgacggattatgcggtgagcaaagctttctactgcgatattcttggtttcacgctgcaaagcgaagtctatcgcgaagcgcgcgactcatggaaaggggatttggcgcttaatgggcaatatgtgattgagcttttctcatttccgttcccgccggaacgacccagccgaccggaagcttgcggtctgcgtcatctggcttttagcgttgatgacatcgatgcggcagtggcgcaccttgaaagccataacgtgaagtgtgaaaccatccgtgtcgatccatacacgcaaaaacgcttcaccttctttaacgatccggacgggctgccgttggaactgtatgagcagtaaggcttgtcatcgccgcatttgcccggtaacgtgccgggcattgctactgtaaaatcgcaccatcatgacactcacgctcaatagacaacttctcacctcacgccagattctggtggcctttagcggcgggcttgactccaccgttctgctgcatcagttggtgcagtggcggacggaaaatccgggtgtcgctctgcgcgctattcatgtgcatcacggtttaagtgccaatgccgatgcctgggttacgcattgcgaaaacgtctgccaacagtggcaggtgccgctggtggtcgaacgcgtacaacttgcgcaagaaggactgggcattgaggcccaggcgcggcaggcacgttatcaggcatttgcccgcaccttgttgcccggtgaagtgctggtcaccgcgcaacatctcgacgatcaatgtgaaacctttctgctggcgctaaaacgcggcagtggccctgccgggctttcggctatggcggaagtctcggagtttgccggaacgcggcttattcgcccgttgctcgcccgcacgcggggggaactggtgcagtgggcgcgtcagtatgatttacgctggattgaagacgaaagtaatcaggacgactcatacgatcgtaactttctgcgcctgcgcgtagtgccgttattgcagcagcgttggccgcattttgccgaagcaacggcccgcagcgccgcactttgtgctgaacaagagagcctgctggatgaactgctggcagatgatttagcacactgtcaatcgccgcaggggacgctgcagattgtgccaatgctggcgatgagtgatgcccgccgcgcggcgattatccgccgctggctggcagggcagaatgcaccgatgccttcccgcgacgcgttggtgaggatctggcaggaagtggcgctggcgcgggaagatgcctcaccctgtttacgtttgggcgcgtttgaaatccgacgctatcagtcgcaactgtggtggattaaatccgtcaccgggcaaagcgaaaacattgtgccgtggcagacgtggcttcaaccgctggaattaccggcggggctgggaagtgtacagcttaatgcgggaggcgatattcgccctccgcgtgcagacgaagcggtcagcgtgcgtttcaaagcgccaggattgctgcatattgtcgggcgtaacggcggacgtaagctaaagaaaatctggcaagagctgggcgtgccgccgtggctacgtgacaccacgccactgctgttttatggcgaaacgctgattgcggcggcaggggtatttgtgacgcaagaaggtgtggctgaaggtgagaatggcgtaagttttgtctggcagaaaacgcttagttaagtgaaagccggataagacgcatcaaacgtcgcatccggcgaaagtcaatcaggattcgcttaccaccaccgtaccgatttccgggtggctaaagctggtaattttatccagacgcagctcgcgggtttcgccagcggcctcgacgaccaggtactccacatttttgcgggagactaaatcactggcttttgcctgcaatttttcgccatctttcagctcaagtgtcagcattaaatgatgctggcaggcgagctcaagattatcgtaatcatcacaattgattggttgatacgtatcattcattgacataatcgctcaccagtaagtttgccgcagcgtatgctgctttttccctgacagcctcagaaagggcgtcgtcggcagccatttcattcagcactttcaaaacgcagcccagcgcgtccggaacgtatcctaagtctccgctggcgatttccgcgtaccgcttgcgtattaactcacaatatttttccacatgccctcctgtcagcactctgacttaaccgtggatgcaagtctaagcctacgaagataaactctgtttcgcaaggtgactataccacactcatttctgcaatatcagcgccgcaactgcacgtattccgttacaatggcctcctgattcgaaaggagttttcttatggcgcttaaagcgacaatttataaagcgacggttaatgtggccgatctcgaccgcaaccagtttctcgatgcctctctgacgctggcgcgccatccttcagaaacccaggagcgtatgatgctgcgcttgctggcgtggctgaaatatgctgatgaacgtctgcaatttacccgtggtttgtgtgccgatgatgagccggaagcgtggctgcgtaacgatcacctgggcattgatttgtggattgagctggggctgccggatgagcggcggattaagaaagcctgcacccaggccgcagaagtggcgctgtttacctataatagtcgggcggcgcaaatctggtggcagcaaaatcagagcaaatgtgtgcagtttgccaatctttccgtctggtatctggacgatgaacaactggcgaaagtaagcgcctttgccgatcgtaccatgacgctgcaggcaacgattcaggatggcgtgatctggttatcggatgataagaataatctggaagtgaacttaaccgcctggcaacaaccttcatgattgtgatttcccgacatgttgctattcccgatggtgagcttgagatcaccgccattcgtgcgcagggcgcgggcgggcagcatgttaataagacctcaacggctattcatctgcgttttgacattcgggcgtccagcctgccagagtattacaaagagcgtctgctcgccgccagccatcatttgatcagcagtgatggcgtgattgtcattaaggcacaggaataccgcagtcaggaactgaaccgcgaagcagctctggcccggctggtggctatgattaaagaattaacaacagaaaaaaaagcccgacgacccacgcggcccacccgtgcatcgaaagagcgcaggctggcatcgaaagcacaaaaatcaagcgtgaaggcgatgcgcggcaaagtgcgcagcggtcgggaataaaaagaaggaatggatggtgaaaaaagcgatagtgacagcgatggctgtaatcagcctctttactctgatgggatgtaataatcgggccgaagtcgatacgctttctccggcgcaggctgccgaactgaaaccgatgccgcaaagttggcgcggcgtgctgccgtgtgccgattgcgaaggaatcgaaacctctctgttcctcgaaaaagacggaacatgggtgatgaatgagcgttatctcggtgctcgtgaagaaccttcctccttcgcttcctacggtacatgggcgcgaaccgctgacaagctggtattaaccgacagcaaaggtgaaaagtcatattatcgggcgaaaggcgatgcgctggagatgctcgatcgtgaaggcaatccgattgaatcgcagttcaactatacgctggaagcggcacaatccagtttacctatgacgccgatgaccctgcggggcatgtatttttatatggctgatgcggcgaccttcactgattgcgcgaccggaaaacgtttcatggtagcgaataacgcagagctggagcgtagctacctggctgcgcgcggtcacagtgaaaaaccggtgttactgtcagtagaaggtcactttacgcttgagggtaatccggataccggtgcgccgactaaagtattggcacccgatacggcagggaaattttaccccaaccaggattgcagtagtttggggcagtaacccgtcttgagacagaaacaaacgcaaaacaggccagaaggatatatttcaacattttgaatttgcacgttttttgtaggccggataaggcgtttacgccgcatccggcaatggtgctcaacgcctgatgcgacgctggcgcgtcttatcatgcctacaacccccctcataccttaaggcggataaggcatttactttatcaccgggtcaaaccaacaaagcgacccgccttgatataaatcccaggcttcaggtgcccaacatactgtaactgcgtttctggcttaaacgcagagacatcaccaatacgcatatgcatcagatcggcagggctaatccagcccgattgcgccagtgtaagtggatgcccggctttggcaaaggcatccgtgacaaattccgaacaaaaccacgactttttgtctccttcgcccacactgcttaactgcgctttcgccaggccgctgacgcactgttggcgaaaatcctcggagaacggattcagtgagcacatctggcgagtcaccataaagggaataaattcgacaatgccgcgatagttataaccgctatctttgattttattggcaaacgcggtgatatctgtggcttgttgcggggtaagatccgggactcgtaagacgaaaagcttatcactatgcttcatcgcttttttaagggaaacgatctggacgccagcgcctgtcgcttctgcaacgttattatcacccagaaagattgcaacgtgactcacagaggaagtgctgaagacgcggattccaaatgaggttaccccaaggcttgaggagaacagcaaatcgccgggtttgagatcaggtgccgttatttcttttattgattgttcggtgaaagagctttgatgctggaatttgacagcccatgtttttgcctcggcatctactgctgtggctgatgggtctggctggctgatatcaacggtacaagccgaaagtaaaagaaagctggggagaaacaggcggcagtacgcctttggtttatccattttatacaatccatgtaaaaaaagggccctgaaattcaggaccctttctggcatcagcctttaatctgtttcaccagatattcgacgatgtcaccagtcttaattaactgtttctcgccgttgcgacgatatttatattcgatatcgtcgttgtcgaggttacggtcgcccagcacaatagtgtgcggaataccgatcagttccatatcagcaaacatcacgcccggacgctctttgcggtcatccagcagcacttcgataccttgtgcacgcagttcgctgtacagtttctcagcaagctcttgtacgcggaaggatttgtgcatgttcatcggcagaatcgccacctggaacggcgcgatagcgtcaggccatacgatgcctcgttcgtcgtagttctgctcaatcgccgcagctaccacacgcgttaccccgataccgtagcaacccatcgtcaggatttggttacggccatcttcaccctgtacggaggctttcagtgcttcggagtacttggtacccagctggaagatgtgaccaacttcgataccacgtttgatcagcagcctaccctggccatccgggcttggatcgccagccaccacgttacggatatctgcaacttccggggtagcgacatcgcgatcccagttgatgccgaagtagtgtttaccatcgatgttagcaccagcagcgaaatcactcatcgccgcaacggtacggtcaatcaccaccggaatcggcatgtttaccggacccagtgaacccggaccggctttaaccacggcacgaatttcttcttcggtcgcgaaagtcagcgggcttgcaacctgcggcagtttttctgctttaacttcgttcagctcgtgatcaccgcgcaccagcagcgcaacctgcgggaagctgctgccttcaaccgctttaaccagcagagtcttaaccgttttctcaatcggcagattgaactgttcaaccagttccgcgatggttttcgcgttcggcgtatcaaccagcgtcatttcctgggtagcagcagcgcgcggttctttcggcgcgatagcttctgccagttcaatgttcgctgcatagtcagaggtgtcggagaagaccacatcgtcttcaccgctctgcgccagcacctggaattcgtgagaggcgctgccgccgatagaaccggtgtcggcttgtacggcgcggaaatccagccccatgcggctgaagattttgctgtaggccgcatacattgcatcgtaggtttcctgcagggattcctgagaagtatggaaagagtaagcatctttcatcaggaattcgcgggaacgcatgacgccgaaacgcggacgcacttcgtcgcggaacttggtctggatctgatagaagttcagcggcagctgtttgtaagagctaagctcgttacgaatcaggtcagtgataacttcttcatgagttgggccgagtacgaacggacgctcgccacggtcaacaaaacgcagcagttccggaccgtactgttcccaacgaccactctcttgccacaaatcggctggctgaaccaccggcatcgacacctcgatcgcaccggcgttgttcatctcttcacgcacgatgttttcgacttttttcagaacgcgcacgccggtcggcagccaggtatataacccggaggccagcttgcggatcatcccggcgcgcagcatcagctgatggctgatcacctcggcgtcggcaggtgtctccttgagagtggagagcaggtattggctagtacgcatgttgttacggttccagttggaaggtagaacaggctcaaggcgagcctgggacaaaaaaaagtgatttagtttaccagtgcaaaagaaatgtcaaaagagaagggcgtgaatttaacgcggttccagcgcaaagacttcaaaacctgcgtcggtgacgcgccagcgaacgttaaaatcatgtagccagacggcataggttttgcccgtttcctcacctttacgataggccgggcgcgggtcctgcgccagtacttcgcggataaacagcgttaactgcggataacgcttctccagcgtcaaaagctgcttttcgacctctgcggtaaaactcaccgccatctctgcagctggcgcactttgcgcatagctggcactggcatcgggaagcgattcggcaaaggggagatacggtttgatatccactaccggcgtaccatcgaccagatccagactgccgagcttcagaatcacgctgtctttatggcaaacaacctctttcagctctaccagcgacatgccaattgggttagggcggaaagtagagcgtgttgcgaaaacccccattctggcgttaccgccgaggcgcggtggacgcacagtcggacgccagccgccttccatcgtttgatgaaagacgaaaaggatccataaatggctgaacgcttccaggccgcgaacggcgtcggcctggttgtagggagcaatgagatgcagttcgccgttggcgctttttaccagacctggctggcgcggaacggcgaacttttctttatagggcgagcgaataacgcctatttgctcgaactggaaactgctcatttcgccgtaatgttaagcgcagaaccgatacatacagcctgacgatagcagcctggcgtaccgctggtgacttcgcagctatgcagtaatacagcattggctttcattttagaggcgttgatttgcatccgcttacgtgcggttggaatgctcggcggagagtcctgattagaggcctggcaagagtcgccactgacttcaccgagatcgcggaacggtttgccgactaattcttctgcattggtataaattcggaccggcgtggcgcgcggcgctttcggttttgcaggctccgctttcggctggggtgcagtgctttgaacgggttcgacaggggatctgcttaacatggaacagccgcttagcatgagtgctactaaacagatcggtaaagcacgcatagtatttcctcaatgtatgatcaaaacgtcaatattgaatcaggagcttgtaaaaatgacaagacgggcaagcgcccgtcctgaatgatattacaaattgtggaaacagcctaaaaattaccagcctttaacagctccgccgttaaacactttgtttgctgcttcgtaaacttcgtcagactgataagcctggacgaatttcttcacgttctcggcgtctttgttatcttcacgcgtcacgatcaggtttacgtacggggactctttatcttcaacaaagataccgtctttcgccggagtcaggccaatctggctggcataggtggtattgataactgccagagcgatttgcgcgtcgtccagagaacgcggcagttgcggtgcttccagttcaacaattttcagatttttggggttctcaacaacatcaagaacggtcggcagcaggccaacgccatctttcagtttgatcaagcccactttttgcagcagcagcagtgaacgaccaaggttagttgggtcgtttggcacggcaacctgcgaaccatcctgcagttcatccagtgatttgattttcttggagtaaccagcaatcggataaacaaaagtgttgcctactgcgaccagtttgtagccacgatctttcagttgctgatcaaggtacggtttatgctggaaggcgttggcgtcgatatcgcctttgctcaatgcttcgtttggcagaacatagtcgttgaaggttaccagctcaacgtccaggccatatttgtctttcgcaactttctgcgcgacttctgcaacctgctgttcggcaccaacaatcacgccgactttaatgtggtttggatctttttcatcctgaccgcagcctaccagtgccagtgatccgatcagggctcccactgccgcaaaggttttgaatttgaacgccataccttattccttcttcaattatttatgttgtgttgaacgttacttgcgagtgacagcccggacgatgcggtcgcctgcgaactgaattaaataaaccagaatgaccagcaataccagtaccgtattcatcaccgtcgcgttatagccgatgtagccatactgatagccaatctgacctaaaccaccggcaccgactgcaccacccatcgcggaataaccgaccagggtaatcagggtgatagttgccgcattcaccagacccggcagcgcttccggtaacagcaccttacggacgatctgcatcggcgtggcacccattgcgcgggaagcttcaattaacccggttgggatctccagcagagcgttctcgaccatacgggcaataaacggtgctgcaccaacggttaacggaacaatcgctgcctgcaaaccaatcgatgtaccgacaataacgcgggtaaacggaatcatccatacaagcaagataatgaacgggatggaacggaaaatgttcacaatcgcagaaacggtacgatacagcttcgcgttagcaataatttgccccggacgcgtgacataaagcagaacgccaaccggcagaccaatcacaaagccaaaaaaaccggatacgaaggtcattgccagcgtttcccatacgccacgaaccagcagccacatcatcggctcagacataacccagtacctctacttttacatggtgttcctgcagccaggcaatggcggcttgcgtatcttgttgtgtgccgtgcatttcagtcagcatgatgccgaacttaacgccaccggcgtaatccatctgcgcgctaataatgttgttgttgacgttgaaacgacgcgcggtttcagaaagcagtggggcatcgaccgattgaccggtaaactccagacgcagcatcggcacgcagtcagtaaatggctccgcttgcagacgttcctggtaatcttccgggatatccagatgcagggtcgactgaataaacttctgcgccagcggcgttttcggatgcgagaacacttcacttaccgtgtcctgctcgatcagttctccattgctgatgaccgccacgcaatcacaaatgcgcttcacaacgtccatttcgtgggtgatcaacagaatcgtcaaccccagacggcggttgatgtctttcagcagttcgagaatagaacgtgtcgttgccgggtccagcgcgctggtggcttcatcacacagcaatactttgggattgctggctaacgcacgggcaattgccacacgttgtttctgcccaccggaaagattcgacgggtagctatcatgcttatcgccaagaccaaccaatgacagcaattccgtcacgcgacgtttgacctcgtctttcggtgtgttgtccagctccagcggcagagccacgttgccaaaaacagtacgcgaagagagcaggttaaaatgctggaaaatcataccaatctggcggcgagctttggtcaactcggattctgacagcgtggtcagttcctggccatcgaccagcacgctaccctcggttgggcgctccagcaggtttacacaacgtataagcgtactcttacccgcgcctgaggcaccgataacgccataaatttgtccagctggcacatgcaggctgacgttgttcaacgcctggatggtgcgggtgccctggtggaacactttggtgatattcgaaagttttatcattgattatttattatcgtcattaagttagtcgtggcatctcgaatgcctgaaacgggcaacgccgtcaatgaaatggatgttaaggcatccagacgtctaaatcaatcaggtttatgcgaagagcactttcttgcaggtcgaaacatgcgatactagcgtcacatgccttattaaggagctataaaaggtggcgaagagcgtacccgcaatttttcttgaccgtgatggcaccattaatgtcgatcacggctatgtccatgagatcgacaactttgaatttatcgacggtgttattgacgccatgcgcgagctaaaaaaaatgggctttgcgctggtggtagtaaccaaccagtctggcattgctcgcggtaaatttaccgaagcacagtttgaaacgctgaccgagtggatggactggtcgctggcggaccgagatgtcgatctggatggtatctattattgcccgcatcatccgcagggtagtgttgaagagtttcgccaggtctgcgattgccgcaaaccacatccggggatgcttttgtcagcacgcgattatttgcatattgatatggccgcttcttatatggtgggcgataaattagaagatatgcaggcagcggttgcggcgaacgtgggaacaaaagtgctggtgcgtacgggtaaacctattacgcctgaagcagaaaacgcggcggattgggtgttaaatagcctggcagacctgccgcaagcgataaaaaagcagcaaaaaccggcacaatgattaaaagatgagcggttgaaataaaaatgcatttttccgcttgtcttcctgagccgactccctataatgcgcctccatcgacacggcggatgtgaatcacttcacacaaacagccggttcggttgaagagaaaaatcctgaaattcagggttgactctgaaagaggaaagcgtaatatacgccacctcgcgacagtgagctgaaagccgcgtcgcaactgctctttaacaatttatcagacaatctgtgtgggcactcgaagatacggattcttaacgtcgcaagacgaaaaatgaataccaagtctcaagagtgaacacgtaattcattacaaagtttaattctttgagcatcaaacttttaaattgaagagtttgatcatggctcagattgaacgctggcggcaggcctaacacatgcaagtcgaacggtaacaggaagaagcttgcttctttgctgacgagtggcggacgggtgagtaatgtctgggaaactgcctgatggagggggataactactggaaacggtagctaataccgcataacgtcgcaagaccaaagagggggaccttcgggcctcttgccatcggatgtgcccagatgggattagctagtaggtggggtaacggctcacctaggcgacgatccctagctggtctgagaggatgaccagccacactggaactgagacacggtccagactcctacgggaggcagcagtggggaatattgcacaatgggcgcaagcctgatgcagccatgccgcgtgtatgaagaaggccttcgggttgtaaagtactttcagcggggaggaagggagtaaagttaatacctttgctcattgacgttacccgcagaagaagcaccggctaactccgtgccagcagccgcggtaatacggagggtgcaagcgttaatcggaattactgggcgtaaagcgcacgcaggcggtttgttaagtcagatgtgaaatccccgggctcaacctgggaactgcatctgatactggcaagcttgagtctcgtagaggggggtagaattccaggtgtagcggtgaaatgcgtagagatctggaggaataccggtggcgaaggcggccccctggacgaagactgacgctcaggtgcgaaagcgtggggagcaaacaggattagataccctggtagtccacgccgtaaacgatgtcgacttggaggttgtgcccttgaggcgtggcttccggagctaacgcgttaagtcgaccgcctggggagtacggccgcaaggttaaaactcaaatgaattgacgggggcccgcacaagcggtggagcatgtggtttaattcgatgcaacgcgaagaaccttacctggtcttgacatccacagaactttccagagatggattggtgccttcgggaactgtgagacaggtgctgcatggctgtcgtcagctcgtgttgtgaaatgttgggttaagtcccgcaacgagcgcaacccttatcttttgttgccagcggtccggccgggaactcaaaggagactgccagtgataaactggaggaaggtggggatgacgtcaagtcatcatggcccttacgaccagggctacacacgtgctacaatggcgcatacaaagagaagcgacctcgcgagagcaagcggacctcataaagtgcgtcgtagtccggattggagtctgcaactcgactccatgaagtcggaatcgctagtaatcgtggatcagaatgccacggtgaatacgttcccgggccttgtacacaccgcccgtcacaccatgggagtgggttgcaaaagaagtaggtagcttaaccttcgggagggcgcttaccactttgtgattcatgactggggtgaagtcgtaacaaggtaaccgtaggggaacctgcggttggatcacctccttaccttaaagaagcgtactttgcagtgctcacacagattgtctgatgaaaatgagcagtaaaacctctacaggcttgtagctcaggtggttagagcgcacccctgataagggtgaggtcggtggttcaagtccactcaggcctaccaaatttgcacggcaaatttgaagaggttttaactacatgttatggggctatagctcagctgggagagcgcctgctttgcacgcaggaggtctgcggttcgatcccgcatagctccaccatctctgtagtggttaaataaaaaatacttcagagtgtacctgcaaaggttcactgcgaagttttgctctttaaaaatctggatcaagctgaaaattgaaacactgaacaatgaaagttgttcgtgagtctctcaaattttcgcaacacgatgatggatcgcaagaaacatcttcgggttgtgaggttaagcgactaagcgtacacggtggatgccctggcagtcagaggcgatgaaggacgtgctaatctgcgataagcgtcggtaaggtgatatgaaccgttataaccggcgatttccgaatggggaaacccagtgtgtttcgacacactatcattaactgaatccataggttaatgaggcgaaccgggggaactgaaacatctaagtaccccgaggaaaagaaatcaaccgagattcccccagtagcggcgagcgaacggggaggagcccagagcctgaatcagtgtgtgtgttagtggaagcgtctggaaaggcgcgcgatacagggtgacagccccgtacacaaaaatgcacatgctgtgagctcgatgagtagggcgggacacgtggtatcctgtctgaatatggggggaccatcctccaaggctaaatactcctgactgaccgatagtgaaccagtaccgtgagggaaaggcgaaaagaaccccggcgaggggagtgaaaaagaacctgaaaccgtgtacgtacaagcagtgggagcatgcttaggcgtgtgactgcgtaccttttgtataatgggtcagcgacttatattctgtagcaaggttaaccgaataggggagccgaagggaaaccgagtcttaactgggcgttaagttgcagggtatagacccgaaacccggtgatctagccatgggcaggttgaaggttgggtaacactaactggaggaccgaaccgactaatgttgaaaaattagcggatgacttgtggctgggggtgaaaggccaatcaaaccgggagatagctggttctccccgaaagctatttaggtagcgcctcgtgaactcatctccgggggtagagcactgtttcggcaagggggtcatcccgacttaccaacccgatgcaaactgcgaataccggagaatgttatcacgggagacacacggcgggtgctaacgtccgtcgtgaagagggaaacaacccagaccgccagctaaggtcccaaagtcatggttaagtgggaaacgatgtgggaaggcccagacagccaggatgttggcttagaagcagccatcatttaaagaaagcgtaatagctcactggtcgagtcggcctgcgcggaagatgtaacggggctaaaccatgcaccgaagctgcggcagcgacgcttatgcgttgttgggtaggggagcgttctgtaagcctgtgaaggtgtactgtgaggtatgctggaggtatcagaagtgcgaatgctgacataagtaacgataaagcgggtgaaaagcccgctcgccggaagaccaagggttcctgtccaacgttaatcggggcagggtgagtcgacccctaaggcgaggccgaaaggcgtagtcgatgggaaacaggttaatattcctgtacttggtgttactgcgaaggggggacggagaaggctatgttggccgggcgacggttgtcccggtttaagcgtgtaggctggttttccaggcaaatccggaaaatcaaggctgaggcgtgatgacgaggcactacggtgctgaagcaacaaatgccctgcttccaggaaaagcctctaagcatcaggtaacatcaaatcgtaccccaaaccgacacaggtggtcaggtagagaataccaaggcgcttgagagaactcgggtgaaggaactaggcaaaatggtgccgtaacttcgggagaaggcacgctgatatgtaggtgaagcgacttgctcgtggagctgaaatcagtcgaagataccagctggctgcaactgtttattaaaaacacagcactgtgcaaacacgaaagtggacgtatacggtgtgacgcctgcccggtgccggaaggttaattgatggggttagcgcaagcgaagctcttgatcgaagccccggtaaacggcggccgtaactataacggtcctaaggtagcgaaattccttgtcgggtaagttccgacctgcacgaatggcgtaatgatggccaggctgtctccacccgagactcagtgaaattgaactcgctgtgaagatgcagtgtacccgcggcaagacggaaagaccccgtgaacctttactatagcttgacactgaacattgagccttgatgtgtaggataggtgggaggctttgaagtgtggacgccagtctgcatggagccgaccttgaaataccaccctttaatgtttgatgttctaacgttgacccgtaatccgggttgcggacagtgtctggtgggtagtttgactggggcggtctcctcctaaagagtaacggaggagcacgaaggttggctaatcctggtcggacatcaggaggttagtgcaatggcataagccagcttgactgcgagcgtgacggcgcgagcaggtgcgaaagcaggtcatagtgatccggtggttctgaatggaagggccatcgctcaacggataaaaggtactccggggataacaggctgataccgcccaagagttcatatcgacggcggtgtttggcacctcgatgtcggctcatcacatcctggggctgaagtaggtcccaagggtatggctgttcgccatttaaagtggtacgcgagctgggtttagaacgtcgtgagacagttcggtccctatctgccgtgggcgctggagaactgaggggggctgctcctagtacgagaggaccggagtggacgcatcactggtgttcgggttgtcatgccaatggcactgcccggtagctaaatgcggaagagataagtgctgaaagcatctaagcacgaaacttgccccgagatgagttctccctgactccttgagagtcctgaaggaacgttgaagacgacgacgttgataggccgggtgtgtaagcgcagcgatgcgttgagctaaccggtactaatgaaccgtgaggcttaaccttacaacgccgaagctgttttggcggattgagagaagattttcagcctgatacagattaaatcagaacgcagaagcggtctgataaaacagaatttgcctggcggccgtagcgcggtggtcccacctgaccccatgccgaactcagaagtgaaacgccgtagcgccgatggtagtgtggggtctccccatgcgagagtagggaactgccaggcatcaaattaagcagtaagccggtcataaaaccggtggttgtaaaagaattcggtggagcggtagttcagtcggttagaatacctgcctgtcacgcagggggtcgcgggttcgagtcccgtccgttccgccacttattaagaagcctcgagttaacgctcgaggttttttttcgtctgtatatctattattgccagaatcgcaaaaatcctctgcattttacgctctttttcctcaacagtctgaagcccataatcacctcagttaacgaaaatagcattaaaagaggcatattatggctatccctgcatttggtttaggtactttccgtctgaaagacgacgttgttatttcatctgtgataacggcgcttgaacttggttatcgcgcaattgataccgcacaaatctatgataacgaagccgcagtaggtcaggcgattgcagaaagtggcgtgccacgtcatgaactctacatcaccactaaaatctggattgaaaatctcagcaaagacaaattgatcccaagtctgaaagagagcctgcaaaaattgcgtaccgattatgttgatctgacgctaatccactggccgtcaccaaacgatgaagtctctgttgaagagtttatgcaggcgctgctggaagccaaaaaacaagggctgacgcgtgagatcggtatttccaacttcacgatcccgttgatggaaaaagcgattgctgctgttggtgctgaaaacatcgctactaaccagattgaactctctccttatctgcaaaaccgtaaagtggttgcctgggctaaacagcacggcatccatattacttcctatatgacgctggcgtatggtaaggccctgaaagatgaggttattgctcgtatcgcagctaaacacaatgcgactccggcacaagtgattctggcgtgggctatgggggaaggttactcagtaattccttcttctactaaacgtaaaaacctggaaagtaatcttaaggcacaaaatttacagcttgatgccgaagataaaaaagcgatcgccgcactggattgcaacgaccgcctggttagcccggaaggtctggctcctgaatgggattaagcctctctgacagctcctccgggagctgtttttacatgctcgctaaggaaatcgataaaagcccggatgcgcgtacttaccgcacggtcgctgtaatagacggcactgaatggcatttccactggcaacactttatctgccattaactccaccaattctccgcgagcgatttctttgtcgatcatgtagtcggacaaacacgcaatcccgttgccactcaggcaaagctgtttcagtgtttccccactattggatgacaaaccgtacttcacctcatgtaattgtccatcgctacgggctatcggccaggtattgagggaagcgggttcagtgaatcccaggcaaatatgttgctttaaatcgtcgatcgtttctggcttcccgtagcgggaaatataatcgggggaggcgataatttttcgataactgttaaataacggcctggcacgtaagctggaatccgttaacgtaccagcgcgtatcgcgacatccacttttctttcgatcaaattaataatcgtttcggaggagactagcgacaaagtgacttccggatagcgttcacggaaaggcttaattaacggcatcagaaagtgcagcaccactggagttgcggcatcgatccgtaacagtccacgcggtgtattacgcgtctccataatttctgattctgccgctgccatctcctgcaaaattgactgtacgcgacgaaaataacgctcgccttcttccgtcaggctaagttgtcgcgtggtccgattaagcaggctaacgccaagtttcatctccagctttttcaccgcccggcttaccgctgagtttgcttgccctaattgttccgctgcccggctaaagctgccgctttcgacgaccgaaacaaaaatggcgagttcttccgacgtggctttcatttttgctcctgttgcaaaatagaagagatattttgaatttatttgtcattaaaccatcaggatgcgtgatatgtcatgcgatttaatgttctccataatgagcaaaattctgaccggtgtaagcacttgcttacataacaatatacaattgctcgttgaaagagtgagctaaaatccctataacagtagaaccctcccgagtgcggaagggttgacgtaatagaggtttcaaagtcaaaagtgcgaaaaaacacctatgccatgcgctatgttgccggacaacctgcggaaaggatcttaccgccggggtcttttgcgagcatcggccaggcattaccacctggggaaccgttaagtaccgaagagcgtattcggatcctggtgtggaacatatacaaacagcaacgcgctgaatggttgtcggtattaaagaactacggcaaagatgcacatctggtgttattgcaggaagcgcagacaacgccagagttagtacagtttgcgaccgctaactatcttgccgccgatcaggtacccgctttcgtgctgccacaacatccttctggcgtaatgaccctttcggcggcacatccagtgtattgctgcccgttacgtgaacgagaacccattttgcgtctggcgaagtcggcactggtgacggtctatccattacctgacacccgcctgttgatggtggttaatatacacgccgtcaacttcagtctgggcgtggatgtctatagtaagcagttacttcctattggcgatcagatagctcaccacagcggcccggtcattatggcgggagatttcaatgcctggagccgtagaaggatgaacgcgttatatcgctttgcgcgggaaatgtcgctgcgccaggtgcgttttaccgatgatcagcgccgtcgggcgtttggtcgcccgctcgattttgttttctaccgtggtctgaacgtcagtgaagcttctgtactggttacgcgcgcttccgatcacaatccgctactcgttgaattcagtcccggcaagcctgataaataaggtatgtcaggtctgccacagggcagaccaacgtttggcgctgcgcaaaacgtgagcgcggtggtggcgtatgacttatctgcccacatgctggatgtcgtggcacaagctgccgaagcccggcaactgaaaaatatcaccacccgccagggatatgccgaaagtctgccatttgccgataacgcatttgatattgttatcagccgttattctgcccatcactggcatgatgttggtgcagcactgcgagaagtgaataggatattgaaacctggcggtaggctgattgtgatggacgtaatgtctccgggtcacccagtgcgcgacatctggttacagacggtagaagcattacgcgatacctctcacgtacgaaactacgccagcggtgagtggttgacgttaatcaatgaagccaatctgatagttgataatttaattacagataagttaccgctggaattttcttcatgggtcgcgagaatgcgtacgccagaagcgttagtagacgctattcgcatttaccaacagagcgcatcgacagaggtgagaacgtattttgccttgcagaatgatggctttttcaccagtgatatcatcatggtagatgcacataaagcggcataaataaaaaaggcaccgggggaatcggtgcctttttattatctggtttgtcaggaatctggcatgttgttgtttttcacaaacaacgtcagcttatcgcctggttgcagattcgcagtgtcgctgttccagcgcatcacatctttgatgttcacgccgtggcgtttagcaatgcttgaaagcgaatcgcctttgcgcacacgatacgtaatgctatcgctgttgtttgccagtcgctgtgcgctactgcctgcaccaatcgtcaaactttggcctggcttcagcttagatccgcgcagtttgttccactgctgcaaatctttggtgcttacgccgagacgtgaagcgatacttgaaagcgtgtcgccagagcgtacggtgtaaacacggctgttaagcggcgtattgtcggcaaccagcgtcgactgtacagcagcaatttcgcctgaagccagagattcacgcagttgatctgcatgcttctttggcaccatcacgtactgcgggccacttgcgcccagcgtggagccttttacgccagcgttgaatgtcttcagcttgctgacggaaatccccgccatatctgctaccttcgccatttcaaccgggctgctcaggtgcacacgcgccagagcacggctttcatcggtcgttggcagacgtacgccataacgcttgctgtttttgagaatatcactcaatgccagcattttaggcacgtactgcttcgtttcctgcggcaacggtaacgaccagaagtccgtggatttcccacgcgctttgttcgttttaattgccttcatgacccgaccttcgccgctgttataagccgctacggtcagaagccagtcgccgtcaaacattttgttcagacgctgcatcatattcagcgcggcagttgttgaagcaacaacatcgcgacgcgcgtcataattgcgggtctgtttcaaaccataattgcgccccgtgctcggaatgatctgccagatgcctgcggcattggcgccagacgttgcgtgaggatcaaaagcgctctccactatgggtagtagtaccagttccataggcatgttacgttttttaacttgccctgctatccagtacatatacggctctgcccgtaaagttacatcgtggagatagctcttattgcgtaaatatttctgtttctgttcgcgaatccggtcattttccggaattcccatctttagctcgtcgccaatgaaagcccacaagtcaccatctggcgcgatagacgtcccatcgtccatccatcgtgcctgacttgtaaactttgctgcttccccttgaccagctgcagaaaggctctgtgcgtgctgttgaacgttgccggtactctggcaacccacgagcaggacagaggcgagtaatatcgcttttgccttcatgtgtgtgtcaatagttgcttaaaagacgaccgatcataacggcgaacggagccgatgacaagaaagttttatcagaacctatctttctttgaccttaaccatgcaaaacgctcttcaggttgttgcaataatgtttcttcattaattacattaattaaatcaatatcttccgttcttaaaaaaacattaatttgccgctcatttttcagaattacgggtagtgttatttgattttttgcccgtaactccttaactttacgataataatcatttatggacaaatcgtgcggaagaatactcaaagcaaacttcatatttgataaggtatattcatgagcacaacataccaatgtatcgtcaggtaacgcacttaactttttaagtgattgatacatttgtgatgctgtcccttcaaacaaccgaccacacccaccagaaaacagtgtgtcgccgcaaaatagataaggtttactgaagtaacagatatgtcctaaagtgtgacccggcgtagcaattacactaaattcatgccccaaaacgaaggcagtttcgccatctttgactacctgtgttgttcccttatcttgtgtctcttgtggaccatacaccacaatttgtggaaacttttccaccagttcttttacgccgccaacgtgatcgtggtgatggtgggtgagaaatatggcctccggttgccagttattggcggcaatggcgtttaatactggctctgcgtctccgggatcgacaatcaggcagcgacctgcttcatcattcaaaacccagatgtaattgtcatcaaaggcgggaatactgttaagattcatagattacctctcagtgtgaaacggaaggttgtgatgaaaccggcaagagtccctcaaactgtcgtggctcctgattgctggggcgatttgccctggggaaagctttatcgcaaggcgctggagcgccagctcaacccgtggttcactaaaatgtatggttttcatctgcttaagattggcaatttaagcgcagaaatcaattgcgaagcgtgcgcggtttctcatcaagtgaatgtttctgcgcaaggaatgcccgtccaggtacaggcggacccacttcatcttccttttgccgataaatccgttgatgtttgtctactggcacatacattgccgtggtgcaccgatccgcatcgtttattgcgtgaagccgatcgggtattgattgatgatggctggctggtcattagtggcttcaatcccatcagttttatgggattacgcaaacttgtgccggtattgcgcaaaacctcgccctataacagccggatgtttactctgatgcggcagctggactggctctctttgttgaattttgaagtgctacacgccagccgtttccacgttctcccgtggaacaaacacggaggaaaactattgaatgcgcatattcctgcgcttggttgcttacaacttattgttgcccggaaacggactattcctttaacgctaaatccgatgaaacagagtaaaaacaagccacgaattcgccaggcggttggagccacccggcaatgtcgtaaaccacaggcttaaacttcaacttggtagcctgtatcttccagtgtgggattcatcgccgcggcacgagccagttcatcacagcgttcgttttccgggtgtccggcatggcctttaacccattcccatttgatttgatgctgccccaatgcagcatcaagacgttgccagagatcgacattttttactggttttttgtctgcggttttccagccacgttttttccagttatggatccactgggtgataccctggcggacatactggctgtcggtactcaaaatgacttcgcaatgttcttttaacgcctccagcgcgacaatagcggccatcaactccatacggttgttggtggtgcgggtgtagccagcgctaaaggttttctcgcgtccgcgatagcgtaaaatagcgccgtaacccccaggtcctggattgcccagacacgaaccatcggtgaaaatttctacctgtttaagcatctctggtagacttcctgtaattgaatcgaactgtaaaacgacaagtctgacataaatgaccgctatgagcactgcaattacacgccagatcgttctcgataccgaaaccaccggtatgaaccagattggtgcgcactatgaaggccacaagatcattgagattggtgccgttgaagtggtgaaccgtcgcctgacgggcaataacttccatgtttatctcaaacccgatcggctggtggatccggaagcctttggcgtacatggtattgccgatgaatttttgctcgataagcccacgtttgccgaagtagccgatgagttcatggactatattcgcggcgcggagttggtgatccataacgcagcgttcgatatcggctttatggactacgagttttcgttgcttaagcgcgatattccgaagaccaatactttctgtaaggtcaccgatagccttgcggtggcgaggaaaatgtttcccggtaagcgcaacagcctcgatgcgttatgtgctcgctacgaaatagataacagtaaacgaacgctgcacggggcattactcgatgcccagatccttgcggaagtttatctggcgatgaccggtggtcaaacgtcgatggcttttgcgatggaaggagagacacaacagcaacaaggtgaagcaacaattcagcgcattgtacgtcaggcaagtaagttacgcgttgtttttgcgacagatgaagagattgcagctcatgaagcccgtctcgatctggtgcagaagaaaggcggaagttgcctctggcgagcataaatacctgtgaaaggcgctaaaaatagcgacttgggcgatttttgcagcaaacgattcaaaagatgagaaaaaccgttgacgaaggtcgaggcaatccgtaatattcgcctcgttcccaacggaacacaacgcggagcggtagttcagtcggttagaatacctgcctgtcacgcagggggtcgcgggttcgagtcccgtccgttccgccactattcactcatgaaaatgagttcagagagccgcaagatttttaattttgcggtttttttgtatttgaattccaccatttctctgttcaatgattttactctggcgtaggtgcgtgattctcgcttgttgtctcattcattaaaattcaataatgatatcgaaccattcagcttaaatatatttctagagaataaatttatattgattaaatgaatgtatatttcaaattgattttgtttgttattatttaagtgaggtatataattagagtccgttatcaatgctaaatattctaatcattatgacaggcgagggagtgtccaattatgaattcaaaaaagctttgttgcatatgtgtgttattctcgctgcttgcaggatgtgcctctgaatcttctattgatgaaaagaagaaaaaagctcaagtcacacaaagtaatattaataaaaacactccccagcaactgacagacaaagatttattcggtaatgaaaccactctggccgtatccgaagaggatattcaagctgcgcttgatggagatgagttccgcgttccccttaattctcctgtaatacttgttcaatccggcaaccgcgcaccggaaaccattatgcaggaggagatgcgaaaatattatactgtttccacattctctggtatcccggacaggcaaaagcctctgacttgtaacaaaaacaaagataaaaatgagaacgaggatgttgccagtgctgagaatatgaactggatgcaggcactgcgttttgtggctgcaaaaggacatcagaaagcgattattgtttaccaggatatgttgcagacaggaaaatatgactctgcgctgaaatcaacagtatggtccgactataaaaatgacaaactcactgacgctatctccctgcgctacctggtacgtttcacgctggtggatgtggcaacaggtgagtgggctacctggtcgccggtgaattatgaatataaagtgcttccaccattgcccgacaagaatgaagccagtacgactgatatgacagagcagcaaatcatgcaacttaagcaaaagacctataaagcgatggtaaaagatttggttaaccgctatcaataataaattatatctgccgccaggaatttctggcggcaataatacaaaattctttgcataagaaatttttcttgacaaagacagtgcaagaaaggacatggaatccggagttaaaaactgtttgttttagaatatttaattatttaactgctgaatcttccttgcgagaaatatatccattattacatttcatgccatttttaatatagattgctcctgggaaaattcccgtattattaccgcaggggtgataattagtattgacatatcctgtgacaaaaggagctattaaaggtgctattacgatagctattagtaaaaatataagagttagctgtattgttatgtctgtggcgaaattgactaccttcgtttttttgattaagaatgattttattatcgtaagtaaaattacatgaatatttaaaaaggaaaacgacatgaaaccgaagcacagaatcaacattctccaatcataaaatatttccgtggagcattttattattgaatatagaggtttaactccggtaaaaaacaaagaagcattgaatgcagggaaaaataatatggccataaaaaacatcgaaagaaactcttttaatttaacatgtaaacgcatggttaatcctcatatcacgggtggagtgttaagaacatacataaatggagtcatgttttcccttttccatttatcaagttcctgttgccgttttagtccatctctaattgcatattttaatttttctgataaatggcattgagcatcgatttcatttaaaacaactgtacacactatccctgtcagtaaaattgctcctccgacaagaattactggaaagccaaagctaacacaggcaaaagaagccagacttccaatagcggttgcaacaccaccggctataactgctttggccacatccattgaaaaatcgccaagaaaattaaccagatctcgctctgaactcataataaattctatggttctgctgatttaaccgcagagaagttcgccacagcaatccgaaaccactggcacgtggagaataagctgcacaggcgtctggacgtggtaatgaatgaagacgactacaaaataagaagaggaaacgcagcagaattattttcagggatacggcacattgctattaatattttgacgaatgagaaggtattcaaggcagggttaagacgtaagatgcgaaaagcagccatggacagaaactacctggcgtcagtccttgcggggagcgggctttcgtagtaataccccgactctccccgtccttaaacacaacccccactcaccacaacctaaactcatccgcatcctgccatgccggaaacttttctctatattcccgcaatgctgccatcgacagctccgcatcaatgcgcgttgcctgatgcgcgtcggcagtagcgataatctctccttgcggattaatcacccggctgtcaccgcgataatggcagccgttgccatcgctgccgacgcgattgcatcccgccacatacgcctgattctcaatcgcgcgggccgtcagcaatgcctgccagtgcagagagcgcggagcaggccagttggcgacgtacagggcgaggtcataatcgttgagattgcgcgaccacacaggaaaacgtaagtcgtagcacaccagcggcaaaatacgccagccgcgccattccacaatcactcgcgcattgcccgctttataatgtagatgctcatctgccatgcggaacagatgacgcttatcataaaaatgtaccgtgccgcccggctcaaccagcaaaaagcggttaaccgaaccagactccgtttgtaatgcaacactgcctgcaatcagcgcattgcactgctgcgccttagctgtcatccagttcactacgtcatcttgtgctagcgacgaagctgccgcttccatggcaaagccgctggtaaacatctccggtagaacgatcacatcgcgcccggtaataccttccagttgacgatcaaaatgacgcaggttggcaggaccatccatccacaccagtggttgctgcaaaagcgtaatcttcaaaccaggcacggtgtacaactcctttatgcgaagggttttataactttaacaccttatcaggcagttgccttagcgcagaataaattgataacaaatgctgatattggaaatatctgatttgcaaattatcgtgttatcgccaggctttaggaggttaataacatgggcaggataagctcgggaggaatgatgtttaaggcaataacgacagtcgccgctctggtcatcgccaccagtgcaatggcgcaggatgatttaaccattagcagccttgcaaagggcgaaaccaccaaagctgcatttaatcagatggtacaagggcataagctgcctgcctgggtgatgaaaggcggtacttatactcccgcacaaaccgtaacgttgggagatgagacgtatcaggtgatgagcgcgtgcaaaccgcatgactgtggctcgcaacgtatcgctgtgatgtggtccgagaaatctaatcagatgacggggctgttctcgactattgatgagaaaacgtcgcaagagaaactcacctggctgaatgtgaacgatgcgctttcgattgatggtaaaacggtgttgttcgcggcgttgaccggcagcctggaaaaccatccggatggctttaattttaaataattagcggataaagaaacggagcctttcggctccgttattcatttacgcggcttcaactttccgcactttctccggcaactttaccggcttcgtcgccagctcttccggatcaaagtcatcaacgttaatactgcgcagacggctttcttcagctttcaccagaatagcggcttcatctttatcaatcagccccttcaccagcgcgttgtgcgccagttcatccagacgggtaaacggcaggtttttacccagctctttacagatccgctgatgaattgggtcggcggcaatcacatccaccagcgcctcttccagcaagccaaccggattatgctcgctcggcgtcaggtactgaccgcgaccaatgcgggaacgggtggcgttcggcacttgtaaaatcttcgccactttatgatccagcttgtcagaaggtgccagataatgacgtccggtcgggaagatcaccacattcagcagcccggcaaccacgcggttcgggaagttttgcagtaaatcatccatcgcctgttcagcctgatacagcgcatcttgtacgccccagtgcaccagcggcaggtcggcttcattacggccttcgtcgtcataacgcttcagcacggcagaggcgaggtagagctggcttaaaatatcccccagacgggccgagatgcgctcgcgacgtttcaggctgccgcccagcactgccatcgagacatcagaaagcagggcgaggttggcgctcaggcggttcaggtgctgatagtagcgtttagtggcatcgccggttggcgtgctgctggttaaaccgcgcgtcaggcccagccagaagctgcgaactttgttgctaccgacgtgaccgatatgtttgaacaacagtttatcgaacgcgttgacgtcattgttcttcgccgcttccatctcttccagcacgtacggatggcaacgaatcgctccttgtccgaagatcatcatgctgcgggtcagaatgttagccccttcaacggtgatggcaatcggtgcgccctggtaagcacgcgccaggaagttgctttgcccgagcataatgcctttaccgccggtaatatccatcgcatcaataatcgactgctgcccgcggtgggtacagtgatacttaacgatagccgacagcacggcaggtttttcgccgagcataatgccgtaggtaatcagcgatgccgcagcatccatcacgtaggcattaccggcaatacgcgccagcggctcttcaatcccttccatcttaccaatagagattttgaactgacggcgaatgtgagcatacgcgccggttgccagcgctaccgatttcacgccgccggttgagttggaaggcagggtgatgccgcggcctaccgagaggcactccaccagcatccgccagccttgcccggccattttcggcccgccgatgatgtaatcgatcggcacgaagacatctttaccgcgcgtcggtccgttctggaacggtacgttcagcgggaagtggcgacgaccaatttccacgcccggcgtggtggttgggatcagcgcacaggtaatgcctaaatcttctgcaccgccgagtaatttttccgggtcggagagtttaaacgccagcccaagcacggtcgcaatcggtgccagcgtaatgtagcgtttgttccaggtcagacgcatccccagcacctgctggccctgccattcgcccatgcagacaatcccggtgtccggaatcgcgcccgcatcggaacccgcttccgggctggtcagtgcaaagcaggggatctcctgaccacgcgccagacgcggcagatagtgatctttctgctcgtcagtgccgtaatgttgcaacagttcgcccgggcctaatgagtttggcacgccgacggtaatcgccaggatcccgctcacgccggagagtttttgcagcacgcgagactgggcataagccgagaactccagcccgccgtactcttttttgatgatcatcgcgaagaaacgatgctctttaaggtacgcccacaactccggcggcagatccgccagctcatgggtgatctggaaatcattcgccatccggcaggcttcttctaccgggccgtcgagaaacgcttgctcttcggcggtcaggcgcggctgcggatagttatgcagctttttccagtccggcttgccctggaacaagtcgccctcccaccaggtggtgcccgcatcaatcgcttctttctcagtgcgcgacatcggcggcatcaccttacggaaaccgcgaaataccggcgcggaaatcatcgacttacgcataggcgcaaagttaaatggcacgaggataatggccagaggcaccagtacccacgccgaccacagaccagcaacgccgagggcggctgtccaggcgagcaaaatcagactgctgataaataagctcacgcggtgatagaacaacgcgccgagcaggacaaccgtagcgagaatactcaaaatcatcataacgaaaagccccttacttgtaggaggtctgaccacttgtgatgatatggttgtagtggatgtaaaaacatttagcaatatgtttacaatataattacaacaaagctcacattgttgctgtttttatccgcacttcaggtcaaaaagtcctggtcatagcacctgcccgtacttctcgcttttggcggtatccggtacactgcattttgtctattacatttatgctgaaggatatcctcatgtaccaggatcttattcgtaacgaactgaacgaagcggcggaaacgctggctaactttttaaaagatgacgccaatattcacgccattcagcgcgcggcggtcctgttagcagacagctttaaagccggtggcaaagtgctttcctgcggcaacggcggttcccattgcgacgctatgcactttgccgaagagttgaccggtcgctaccgtgaaaaccgtccgggctacccggcgattgctatttctgacgttagtcatatttcctgcgtcggtaatgatttcggtttcaatgatattttctcccgctacgttgaagcggtaggtcgcgaaggcgatgtactgctggggatctccacctccggtaactctgcaaacgtgatcaaagcgatcgcagcggcgcgtgagaagggaatgaaagtgatcaccctgaccggtaaagacggcggcaaaatggctggcacggcggatatcgaaattcgcgtaccgcactttggttatgccgaccgcattcaggagattcacattaaagtgatccatatcctgatccagttgattgaaaaagagatggttaagtaagtctggcgtaggccggataagacgtttacgccgcatccggcatttgtgcgctgatgcctgatgcgacgctgacgcgtcttatcatgcctacaaatctgtacgcgaaccgtaggccgaataatgcgttcacgccgcatccgacctgaaaattcttaaatcaatcttcgccgggggccatgcgctcccgctgttgtggaggttacccatgtgcgaattgctcgggatgagcgccaacgtccctaccgatatctgctttagtttcaccgggcttgtacagcgtggtggtggaaccgggccacataaagatggctggggcattaccttttacgaaggtaaaggctgtcgcacatttaaagatccacaacccagctttaattcccccatcgccaaacttgtccaggactacccgataaaatcctgttcggtggtggctcatattcgccaggctaatcggggcgaggtggcgctggaaaatactcacccatttacccgcgagttatgggggcgtaactggacttatgcccataacggacaactgacgggctacaaatcactggaaaccggcaacttccgcccggtaggcgaaaccgacagcgaaaaagccttctgctggctcctgcataaattaacgcagcgttacccgcgcacaccgggcaacatggcggcggtatttaaatatatcgcctcactggcggatgaactgcggcagaagggcgttttcaacatgctgctttcggacgggcgctatgtaatggcgtattgctcgactaatttacactggatcacccgccgcgcgccgtttggcgtggcaacgttgctggatcaggatgtggaaatcgacttcagctcgcagaccacaccgaatgatgtggtcacggtgattgcaacacagccgctgacgggcaatgaaacctggcaaaagattatgccaggcgaatggcgcttattttgcctcggggagcgtgtagtttgatgccagttgtggctgcacaacttcgtggcttaacggcttgctgaccacgtaacgaccattgaccacagaaacggttggtggcttacgggtttgctcaaagtagtcgtaacccggcttcagttgctcccagaagtccttaaagttggaatatttatggcgcttcatattggcgtcggtcatgcggaacgggtaaatactcacttgcacgctcggctgaccaaacaccagcgcaccagtaacgaactggaatatctcatcaataccctgattggtcattgcgtagcagccgatggaaacacaatcgccgtggatcatcaggtatttcccttcataaccatgcgcacggtcataggcattggggaaaccaatattaatcgctttgtagtaacggctgtctggttttaactgattacgctggacgctataaaacccttccgggcttttgaaatcgccctgacgctgttttggccctaagccgccggaatatttacagattttatagctgtcgagcagttgatattgctcgcccattttgacgtagagatcgagcgtacgttcttccttgaagatctggatgtagacaggggatcccatcaactgctgcttatactctttgctcacaggcgtggtagagctactgctgcccagcaaaccggcaaatgaaacgcacgggatcaacaacatcgcaagaattaatgcgattttacgcatactgcttattccttgataaaacggttacacacgccaggacggcaaaatggatcccaaatcggaatagtctggatttggaaggctcacattatcaccaaaagagttttacgcaagcctgtcggcgcagggtttacaaatttcatcggaagcgggctttacccaaagagcgccgcgtgagttccagttctctcaaatcgtaaaagtttatcggtaagtttgtaaatcaggatccagtccggttcgacatgagcatcgcgataacctttccatgaaccttgcagcgggtggtctttataaacagctggaagcggtaaagtattattgataagaagcgtcataagatatttcaatttattcatatccttatgacgcttttgtgcaagttttacatcctttgaatattgtcccgagtattcaatatccctttgaatcatatttaaattcctaatttatcaaataaatcatcggcgtctttggccttatgaacatcaatgccagcttcgctgtttttgattgattgaatggttaattgattaggctcgcgtaaatcaaacggcaatgccttttcacgcgcgacctttgtgagggttatgcgaaccaggtcagagatggtcagccccatcccggccagtacgtccgctgcctgattcttcagatcttcatcgattcgggcgcgaacaaacgcgttagcagccattggggtatctcctgtgctgtatatttattcagcttgaattgtagctcaaatgagcaacagcgacaatccatgagtaatttaataaacggatgtttttacataattaactgaaatatatatgttaattttataataatggtttattaagtttgttcagaaacgatccgggatacactgcaacattaaagcatgaccagccattattgagtatgtccttgccgtcgattccatcctttgtattgtcgggattactgttgatttgtttgccgttttcttcatttgccagcgccaccacatcacatatctctttcagctacgccgcccgccagcggatgcaaaaccgtgcgcgtttattaaaacagtaccaaactcatctgaaaaagcaggccagctatattgtggaaggcaatgccgaaagcaaaagggcgctacgccagcacaaccgggagcagataaaacagcatccagaatggtttcctgctccgctcaaggcgagtgacagacgctggcaggcgctggcggaaaacaaccactttttaagcagcgaccatctgcataacattaccgaagtggcgattcaccgcctggagcagcagcttggcaagccttacgtctggggcggtacgcggcctgataaaggctttgactgtagcgggttggttttttatgcctacaacaagatccttgaggctaagctcccgcgcacggccaatgagatgtaccactatcgccgggcaacgattgtggcgaacaacgacctgcgccggggagatttgctgtttttccatatccacagccgcgagatagccgatcatatgggcgtgtatttgggcgatgggcaatttatcgagtcgccacgtaccggcgaaaccattcggataagccgattagccgaacctttctggcaggaccattttttgggcgcgcgcaggattttgacggaagagacgattttgtaggacggataaggcgtttacgccgcatccggcagttgtacgcaggtgcctgatgcgacgctggcgcgtcttatcatgcctacgagcccgcgaatatttgcgagccgctttcccgatataaaacaacctcattgccaacctttccttttcttcttaccgttgagaaaaaggagtcgccatgtctgaatatcgtcgttattacatcaaggggggaacatggtttttcacggtgaatttacgaaatcgtcgaagccaacttttgaccacccagtaccagatgctccgtcacgccattattaaagttaagcgagacaggccttttgaaatcaacgcctgggtcgttttgccagagcatatgcactgtatctggacattacctgaaggcgatgatgatttttcctcgcgctggcgggaaattaaaaagcaatttacccatgcttgtggattgaaaaatatctggcaaccacgtttttgggagcacgccatccgcaataccaaagattataggcatcatgttgattatatttatataaatccagtaaagcatggttgggtaaagcaagtgagtgattggccattctcaacgttccatcgcgatgtcgcgcgagggttatatcccatcgattgggcgggggacgtaacggattttagtgccggggagcgtatcatttcataattgtgcgcagatgcctgatgcgacgctagcgcgtcttatcatgcctacaaacttgtgccggatcggtaggccggataaggcgtttatgccgcatccggcagttatgcgcagatgcctgatgcgacgctggcgcgtcttatcatgcctacaaacttgtgcctgaacggtaggacggataaggcgttcacgccgcatccggcagttgtgcaccaatgctggatacttacatcaacgcccccataatcttcaactccagctcatccggcacttcgttatacgacagcacatgcagccccggcgcaaacaaccttgcataacgcgccagcaaagggcgcagctgcggtggcaccagcagcaccgggtctttccccgccgctttcatctgctctttcacctgtggcatcgtactctggaactggttgagcatattcggatcgaccggcacgctgtcgagcatcactttcccgccctgttgcgcctgattcaccacgttggtcagcagattttccagctcattattcagcgtatacaccgtcagctcctgcttgcgaacgaacggatgggtaatgctgcgccgcaatgccaggcgcacatcggccgccagcagaatatgatctttcgtcaccgtgctactggcgaccagcacggtggcgatggtgacgatatcgcgcagggaaacgccttcggtcagcagcgcccggtacactttcagcaactggctgtaattgagcgccgcgctcaaatcttccgccagacgcggtgccgtcgacgataaacggttatgcaactgcgtaatatcatcatagttaaacaaatcaggaatatagctgcgcacaatcttatttacatgggtagcgatcacgctggcgctgtcgatcacctgataccccatattcagcgccttcgctttctgcgccgcctggatccaggtgaccggcatcccgtacgccgggtcgttcccctgcacgccgtcaatctcgccgtaggtttcgctggagggcagggccatcagtttatccgccggaatatccgcttcatcagcctttatgccgttgatgaaaatggcgtactgactgggcttaaggcggaagttttcccgaatgcggatctccggcagcagcacgccgttgccgtcagaaatcacctgccgcacgccgcgaatccgctgggtgagcgggttaccctgtgctttgtccaccagcgccaccagtttgtaaccgaggcttaaactgataggctcgatcagcggaatggtttcccaactgacctgctgctcgctggtttcggtgatggtgcgggtcagcgtttcgaggcttttctcttccgcctccgccgccagcggctgtttgctcatccgccagccggtaaaaccaagcagggcgctgaacagcaaaaacggcaggtgcggcattcccggtaccaccgccagcacgaacataatcccggtggcggtgtagagcaccgacgggcttgccagcagctggttacgcacgtcatgggcgatatcgccgttgtcgctgacgcgggtgacgataatcgccgccgcggtggagagcagcagggaagggatctgcgccaccaggccgtcgccgatggtcatcagcacatactgctggaaggcagcatcggcgctcaggttgtatttgaagatcccgatacagacgccgccgatcaggttgatcgccagaatcatcatcccggcgatggcgtccccgcgcacaaacttcgatgccccgtccatcgcgccgtagaaatcggcctcgctggcaacatctttacgccgggtttgcgcctgcgcctggttgatcaatccggcgttaagatcggcgtcaatcgccatctgtttgccgggcatcgcgtctaaggtaaagcgggcagaaacctcggaaatacgctcggcccctttggtgacgacaataaagttgattgtcaacagcgtcagtaaatccgagcgtgaaagcattatcgccgcgctgcacgggcagtcgatttttaacggtggtgggctgtcgccgttaaataaaatcagcccgtctcatccgccaaaacctgccaccgtggcggtgccggaagagacggagaaaaaagcgcgtgatgtgaatgagaaaacggcgctgctgaagaagaaatccgccaccgagcttggtgagctggcaaccagtatcaacaccattgcccgtgatgcgcatatggaagcgaatctggagatggagattgttccccagggattacgcgtgctgattaaagacgaccagaaccgcaatatgtttgaacgcggcagcgcgaagattatgccgttctttaaaacgctgctggtggagctcgcgccagtgttcgactcgctcgataataaaattattattaccgggcataccgatgcgatggcctacaaaaacaatatctacaacaactggaacctttcgggtgaccgcgcgctttcggctcgtcgggtgctggaagaggccggaatgccggaagataaagtgatgcaggtaagcgcaatggcggaccagatgctgctggattccaaaaatccgcaaagcgcgggcaaccggcgcattgagattatggtgctgaccaaaagtgcgtccgatacgctgtatcaatactttggtcagcatggggataaagtggtgcagccgctggtgcaaaagctggataagcagcaggtgctttcgcagcgaacgcgttaaatgctgaatctttacgcatttctcaaaccctgaaatcactgtatactttaccagtgttgagaggtgagcaatgcgtaaaatcattcatgtggatatggactgctttttcgccgcagtggagatgcgcgacaatcccgccctgcgcgatatccctattgctattggcggcagccgcgaacgtcggggggtgatcagcaccgccaattatcccgcgcgtaaatttggcgtacgtagcgctatgccgacagggatggcgctcaaattatgcccacatctcaccttgcttccggggcgctttgacgcctacaaagaagcctcaaatcatatccgtgaaatcttctcgcgctacacctcgcgcattgaaccgttgtcactggatgaggcttatctcgatgtcaccgatagcgtccattgccacggttctgcgaccctcatcgcccaggaaatccgccagacaatcttcaacgagctgcaactgacggcgtctgcgggcgtggcaccagtaaagtttctcgccaaaatcgcctccgacatgaataaacccaacggccagtttgtgattacgccggcagaagttccggcatttttacaaaccttaccgctggcaaaaatccccggcgtcggcaaagtctcagcggcaaaactggaagcgatggggctgcggacctgcggtgatgtacaaaagtgtgatctggtgatgctgcttaaacgctttggcaaatttggccgcattttgtgggagcgtagtcaggggattgacgaacgcgatgttaacagcgaacggttgcgaaaatccgtcggcgtggaacgcacgatggcggaagatattcatcactggtctgaatgtgaagcgattatcgagcggctgtatccggaacttgaacgccgtctggcaaaggtaaaacctgatttactgattgctcgccagggggtgaaattaaagttcgacgattttcagcaaaccacccaggagcacgtctggccgcggctgaataaagctgatctaatcgccaccgcgcgtaaaacctgggatgaacgccgcggcgggcgcggtgtgcgtctggtggggctgcatgtgacgttgcttgacccgcaaatggaaagacaactggtgctgggattatgatgtatactattatgtatattctggtgtgcattattatgagggtatcactgtatgcatcgaattctcgctgaaaaatcggtcaatatcactgagttacgtaaaaacccagctaaatactttattgatcaaccggttgcggttctttctaataatcgccccgcaggatatctcttaagtgccagcgcattcgaagcgttaatggacatgcttgctgaacaagaggagaaaaagcccataaaggcgcgcttccgtccaagtgctgcaagattagaggaaattacacgccgcgctgaacaatatcttaatgatatgacggatgatgatttcaatgactttaaggaataaggatgcgggtattcaaaacaaaacttattcgcctgcaacttacagcagaggaacttgatgcgttaacggcggattttatttcctataagcgtgacggtgttttgccagatatatttggtcgcgatgcactctacgacgactcctttacctggccattaatcaaatttgagcgagttgctcatattcatctggcaaatgagaataatccatttccgccacagttgcgccaattcagcagaacgaatgacgaagcgcatttggtatattgtcagggggcgtttgatgagcaagcatggttgctcattgccattctgaaacctgaacctcataaactggctcgagataacaaccaaatgcataaaattgggaaaatggcagaagcgtttcgcatgcgtttttgaatttatattatgaataacatacaaataagaaactatcagcctggcgattttcagcaactatgcgctattttcattagagcggttacgatgaccgccagtcagcattattcaccacaacaaatttccgcctgggcgcagattgacgaatctcgctggaaggagaaactcgcgaaatcacaagtgtgggttgcgatcattaatgcacaaccggttggttttatttcccgcattgaacattatatcgatatgttatttgttgaccctgaatacacccgccgtggggttgccagcgctttgttaaaacctttgattaagtctgaatccgaacttacggtggacgcaagcataaccgcaaaacccttttttgaacgttatggttttcagacagttaagcagcagcgcgttgaatgccggggagcgtggtttactaatttttatatgcgatataaaccgcaacattaaatccagcttgcaatgaaaataacgcccgcctggtatgtgcgcgttttctgattccacaaactgcaaggaggtaaatcatgacaaatcctttatcaatgactctttgcagacctttccaggattaattctttttttcttgccctggattcgtctgccatttcctgatttttatatttatatactctaaataattcgagttgcaggaaggcgacaagcgagtgaatcgccaggagcttacataagtaagtgactggggtgaacgaacgcagtcgcagtacatgcaacttgaagtatgacgagtataaatggaatggtacatgggcaaatatattcgtcccttatccgatgcggtatttaccatcgcatctgatgacctgtggatcgagagtttagcgatccaacaattacacaccacggcaaatttacccaacatgcagcgcgtagtggggatgccagatttacaccccggacgcggctacccgattggcgcagcgttcttctctgttggtcgtttttacccggcaagacgtcgcggtaacggtgctggaaacagaaacgggccgctactctgacacactgcgttcggcgctggtttctctcgatggcgataacgcatgggcattaagcgaaagctggtgtggcactattcagtggatttgtccgagtccgtatcggcctcatcatgggcgcaaaaactggtttctgggcattgggcgttttaccgctgatgagcaggaacaatcggatgcaatccgttatgagacgctgcgttcgtcggggccgggcggtcaacatgtcaataaaaccgactcggcggtacgcgccacgcatttggcatccggtattagcgtgaaggttcagtcagagcgtagtcagcatgctaacaagcggctggcacgattgctgattgcctggaagctggagcaacagcaacaggaaaatagcgcggcgctgaaatcgcagcggcgaatgttccatcaccagattgaacgtggcaacccgcgacggacatttacagggatggcttttatcgaaggataatgaaggatgaaactgccggaaggcgattaaacgccatccggcagcaaatcaaataattacttcgccggaatttctttcagcagttcagtcagcagtgtccagtaatgacctacgctttcgatgtgaacttgctcatccggagagtgtggaccggtgatagttggcccgatagaaaccatgtccatttccggatacggttttttgaacagaccacattccaggcccgcgtggataatctggatgttcggcgtcttgttgaacaggcgctgataggtttcacgtaccagatgcatcaccggagaattagcgtccggctgccagccaggatatgcgcctttcgcttcggttttcgcgccagccagtttacccagcgaatccagcatgctcaccacgtagtctttaccgctgtcgatcagtgaacggatcaggcagtgaatttctacgttattgtcagtcatggtcaccacaccgacgttcagggaggtttcaaccacacctttggctacatcggagttacgaatcacaccgttcggggtggcgttcagcagacgaataaaggtatcgcgagatttcgcaatcagggcagctttatcgttcgctacagagtccagcaacaaggccagatttttctctttttctgccagctcgtttttcaggatctcctgataggtattcaccagagatttcaggacgtcgactttatcagctgcgacagcaatggtcgcaaaggcttcacgcgggatggcgttacgcagtgtgccgccgttgaaatcgataaggcgcagatccagttcttccgcatgacccgccaggaagcgcaccagcagtttgttggcattacccagcccaacgtggatttccccgccggagtgaccgcctttcagaccttttaaggttaacttgaaggtttcaaaaccagctggaaccgcttcacgatctaaatgcaggttggaggtgaagtcgataccccccgcacaacccatgtagatttcaccttcttcttcggagtcggtgttaatcagaatatcagcctgcaaccagttgccctgtaagccgaacgcaccgtccataccggcttcttcggtcatggtcagcagcacttccagcgggccgtgaaccacgttttcgtcagccagaaccgccagcgcagaggccataccaatgccgttatccgcacccagcgtggtgccgcgcgctttaacccattcgccatcaatataaggctggataggatctttcgtgaagtcatgcacggtgtcgttatttttctgcggcaccatatcgaggtgggcctgtaagacgaccggtttacgattttccatacctgcggtagcaggtttacgaatcaggatattacctacctgatcgcgttcgacatggaaacctttctcttttgcccaaccaacaatgtattcagcgagttgctcttcatgataggacgggtgaggaatagaacagattttggcaaaaatatcccacagcggctgtggagataattgagacagttcagacacgttaagtctccttgtcgatcacccgcaaaacagtattgcaggtcacagggttagcagaaaatgttgtcaacacaagacaggcttgcgagatatgtttgagaataccactttatcccgcgtcagggagaggcagtgcgtaaaaagacgcggactcatgtgaaatactggtttttagtgcgccagatctctataatctcgcgcaacctattttcccctcgaacactttttaagccgtagataaacaggctgggacacttcacatgagcgaaaaatacatcgtcacctgggacatgttgcagatccatgcacgtaaactcgcaagccgactgatgccttctgaacaatggaaaggcattattgccgtaagccgtggcggtctggtaccgggtgcgttactggcgcgtgaactgggtattcgtcatgtcgataccgtttgtatttccagctacgatcacgacaaccagcgcgagcttaaagtgctgaaacgcgcagaaggcgatggcgaaggcttcatcgttattgatgacctggtggataccggtggtactgcggttgcgattcgtgaaatgtatccaaaagcgcactttgtcaccatcttcgcaaaaccggctggtcgtccgctggttgatgactatgttgttgatatcccgcaagatacctggattgaacagccgtgggatatgggcgtcgtattcgtcccgccaatctccggtcgctaatcttttcaacgcctggcactgccgggcgttgttctttttaacttcaggcgggttacaatagtttccagtaagtattctggaggctgcatccatgacacaggcaaacctgagcgaaaccctgttcaaaccccgctttaaacatcctgaaacctcgacgctagtccgccgctttaatcacggcgcacaaccgcctgtgcagtcggcccttgatggtaaaaccatccctcactggtatcgcatgattaaccgtctgatgtggatctggcgcggcattgacccacgcgaaatcctcgacgtccaggcacgtattgtgatgagcgatgccgaacgtaccgacgatgatttatacgatacggtgattggctaccgtggcggcaactggatttatgagtgggccacccaggcgatggtgtggcaacaaaaagcctgtgcggaagacgatccgcaactcagtggtcgtcactggctgcatgcggctacgttgtacaacattgccgcctatcctcatctgaaaggagatgacctggccgagcaagcgcaggctttgtcaaaccgcgcctatgaagaggccgctcagcgtctaccgggcacgatgcggcagatggagtttaccgtacccggcggtgcgcccatcaccggctttttgcatatgccgaaaggcgatggcccgttcccgacggtattaatgtgtggtggtctggatgcgatgcagacggactattacagcctgtatgaacgttattttgcgccgcgcggcattgcgatgctgactattgatatgccgtcggtgggcttttcttcaaaatggaagctcacccaggactccagcctgttgcatcagcacgtcttaaaggcgctgcctaacgtaccgtgggtggatcacactcgcgtcgcggcctttggtttccgtttcggcgctaacgttgccgtgcgtctggcataccttgaatcgccgcgtctgaaagcggttgcctgtcttggtccggtagttcataccctgttgagtgattttaagtgccagcaacaggtgccggaaatgtatcttgacgttctggccagtcgtttggggatgcatgatgcttccgatgaagcgttgcgcgtggagctgaatcgctattcattaaaagtgcaaggattgctgggacgtcgctgcccaacgccaatgttatcaggctactggaagaacgatccgttcagcccggaagaggactcacgcttaatcacctcatcatctgctgacggtaaattattagagatcccatttaacccggtgtatcggaattttgacaaaggtcttcaggaaatcaccgactggatcgaaaaacgcttgtgttaaaaatttgctaaattttgccaatttggtaaaacagttgcatcacaacaggagatagcaatgacgttaccgagtggacacccgaagagcagattgatcaaaaaatttaccgcactaggcccgtatattcgtgaaggtaagtgcaaagataatcgattctttttcgattgtctggctgtatgcgtcaacgtgaaaccggcaccggaagtgcgtgaattctggggctggtggatggagctggaagcgcaggaatcccgttttacctacagttaccagtttggtctgttcgataaagcaggcgactggaagagtgttccggtaaaagacactgaagtggttgaacgactggagcacaccctgcgtgagtttcacgagaagctgcgtgaactgctgacgacgctgaatctgaagctggaaccggcggatgattttcgtgacgagccggtgaagttaacggcgtgagtgaaatgtgccggatgcatcacatccggcaatattcattaaaactgatacgtcatgccaaccgcgacaatatcatcattattaatattcaatttgttatcgctatccagttggttgattttataatcaacaaacgctgacatatttttgttgaaataatacgtagcaccgacgtcgatataattgaccagatcttcatcaccgataccttcaatatctttccctttcgataagacataacccagcgatggacgcagaccaaagtcaaactggtattgagcgaccgcttcaaagttctgtgtcttattggcaaagccgccagttattggcgtcattttgcgtgtttcagaatagaaagttgccagataaatattattggcatcgtatttcagacctgttgcccatgcttctgcacgcttgcctgtgccacggctttgcaggttctgctcgttggtgcgatctgagttggtataggccccactaatggcgaaatcgctgccgccaaagtcatatgtcaatgacgtgccgaagccatcgccgttttgctttttaacgtcgcggttttcgtttttcccttgatattgcagggttaagttcaggccatcgataacgccgaagaagtcggtgttccgatacgtcgccagaccgctggcgcgtttggtcataaagttgtcggtctgcgccgaggaatcgccaccaaattccgggaacatatcggtccaggcttccacgtcatacaacgcccccaggttacgaccataatcgaaagaacccaaatctttatatttcaacccggcaaaagcgagacgcgttttttgctgtgcagtatcactctctgctttattaccggcaaactctgcttcccaacgaccataaccagtcagttgatcgttaatttgtgtttcgcctttgaaaccaaaacggatataactctggtcgccatctttactggcgttatcactcatataatgcatggctttaactttgccatagacatccagtttattaccgtctttattatatatttctgcagcctgtacagatgcagatgccacaatgcccatcaccactaatgccagagtgctctttttcattttcattcctgattttaattaacgcgcgaatattcagcgggagagtcccgttgaaaacaggaaagtttttaacctgagattgttaaagatatattacagattaataatattcttaaaatgtggtaatttattaaatctgtaataaaagcgtaaacaactgccgctaggcttgctgatcccgcgcaacaaaacgccatgctttgctcgcagatggttggcaaccgacgacagtcctgctaaaacgttcgtttgatatcatttttcctaaaattgaatggcagagaatcatgagtgacagccagacgctggtggtaaaactcggcaccagtgtgctaacaggcggatcgcgccgtctgaaccgtgcccatatcgttgaacttgttcgccagtgcgcgcagttacatgccgccgggcatcggattgttattgtgacgtcgggcgcgatcgccgccggacgtgagcacctgggttacccggaactgccagcgaccatcgcctcgaaacaactgctggcggcggtagggcagagtcgactgattcaactgtgggaacagctgttttcgatttatggcattcacgtcgggcaaatgctgctgacccgtgctgatatggaagaccgtgaacgcttcctgaacgcccgcgacaccctgcgagcgttgctcgataacaatatcgttccggtaatcaatgagaacgatgctgtcgctacggcagagattaaggtcggcgataacgataacctttctgcgctggcggcgattcttgcgggtgccgataaactgttgctgctgaccgatcaaaaaggtttgtataccgctgacccgcgcagcaatccgcaggcagaactgattaaagatgtttacggcattgatgacgcactgcgcgcgattgccggtgacagcgtttcaggcctcggaactggcggcatgagtaccaaattgcaggccgctgacgtggcttgccgtgcgggtatcgacaccattattgccgcgggcagcaagccgggcgttattggtgatgtgatggaaggcatttccgtcggtacgctgttccatgcccaggcgactccgcttgaaaaccgtaaacgctggattttcggtgcgccgccggcgggtgaaatcacggtagatgaaggggcaactgccgccattctggaacgcggcagctccctgttgccgaaaggcattaaaagcgtgactggcaatttctcgcgtggtgaagtcatccgcatttgcaacctcgaaggccgcgatatcgcccacggcgtcagtcgttacaacagcgatgcattacgccgtattgccggacaccactcgcaagaaattgatgcaatactgggatatgaatacggcccggttgccgttcaccgtgatgacatgattacccgttaaggagcaggctgatgctggaacaaatgggcattgccgcgaagcaagcctcgtataaattagcgcaactctccagccgcgaaaaaaatcgcgtgctggaaaaaatcgccgatgaactggaagcacaaagcgaaatcatcctcaacgctaacgcccaggatgttgctgacgcgcgagccaatggccttagcgaagcgatgcttgaccgtctggcactgacgcccgcacggctgaaaggcattgccgacgatgtacgtcaggtgtgcaacctcgccgatccggtggggcaggtaatcgatggcggcgtactggacagcggcctgcgtcttgagcgtcgtcgcgtaccgctgggggttattggcgtgatttatgaagcgcgcccgaacgtgacggttgatgtcgcttcgctgtgcctgaaaaccggtaatgcggtgatcctgcgcggtggcaaagaaacgtgtcgcactaacgctgcaacggtggcggtgattcaggacgccctgaaatcctgcggcttaccggcgggtgccgtgcaggcgattgataatcctgaccgtgcgctggtcagtgaaatgctgcgtatggataaatacatcgacatgctgatcccgcgtggtggcgctggtttgcataaactgtgccgtgaacagtcgacaatcccggtgatcacaggtggtataggcgtatgccatatttacgttgatgaaagtgtagagatcgctgaagcattaaaagtgatcgtcaacgcgaaaactcagcgtccgagcacatgtaatacggttgaaacgttgctggtgaataaaaacatcgccgatagcttcctgcccgcattaagcaaacaaatggcggaaagcggcgtgacattacacgcagatgcagctgcactggcgcagttgcaggcaggccctgcgaaggtggttgctgttaaagccgaagagtatgacgatgagtttctgtcattagatttgaacgtcaaaatcgtcagcgatcttgacgatgccatcgcccatattcgtgaacacggcacacaacactccgatgcgatcctgacccgcgatatgcgcaacgcccagcgttttgttaacgaagtggattcgtccgctgtttacgttaacgcctctacgcgttttaccgacggcggccagtttggtctgggtgcggaagtggcggtaagcacacaaaaactccacgcgcgtggcccaatggggctggaagcactgaccacttacaagtggatcggcattggtgattacaccattcgtgcgtaaataaaaccgggtgatgcaaaagtagccatttgattcacaaggccattgacgcatcgcccggttagttttaaccttgtccaccgtgattcacgttcgtgaacatgtcctttcagggccgatatagctcagttggtagagcagcgcattcgtaatgcgaaggtcgtaggttcgactcctattatcggcaccattaaaatcaaattgttacgtaagatcttatcattctcccaccaaaaaattatcttaatgtaacagctggtgtaagtaaattctatcaacgaagatcaatcttatctactgaccaaaaaggcctgatagggcttcgctcactatacatccttggctgcaggtttagttgtacaccactcctaaatttaatgtgttggcaatgtgttcaataaagctcgaacaaattagctcattatgatcggttaatacttcaacttctggttgcatgattgtttgtccgtaaaaagataacgcgcctgccgggtagtagcaggcgcattacgcaataggtaaacaagggaggaagttcagaaatgtaaatcgggaaggttgtacgcaatgttcatcgtactacgttgttacggctttgccgcaacaagccagttgcctgccgcgctcgcagaatgtctgcagcccggagataaggagattgttcctgccagctaaatcccttcctgtcgatacgaaccagctcgtatttttctaccagaaaattcacggcatcggctagggtgataccggcatcgatgtgttccttaatcacagcctcattgcagaatggcgtgtcgtttattgtcagaccatagtgctgttccagcagacgtgtcagtaacatttgccagacagccacgggtgacaggcagggcttcaccgcccgctgagttattgcaggtaaagttttcatgtttgctctcgtgtaggtaattaacgctgagtggggtaaatggcgatgtatacgtagccgcaactgccaagggtgtcggcttcgcaggttaaatcgttgtggtacagggtaacgcagtgggcatggtgggggctgagttcaccggtggtcagcatcgattccatctggaggataaagtgcgggaatgtttcatccagcttccggcattcgatgtcactgaacttgccggtgatgctggcccggtcagccagataatgcagtcggttgccttcctgcaccagacgggctcccaggcgcagtgtaatctcccgctgcaggcccctggtagggttgctcattacagttctccactattgtcagttcagggtgatgctcatcaggcaggtatagggcccattgcggtcctggcggcgttcggcgtataccgcgaggactccggcgatatccggaacgtccctgccggtgtaatgacagacgctaccgtgccactggtatttgccggtgcagtagcgaaagattcgggactcaggatgctggcggtatatcgtcattgccctgcgtttactgataattttcatgtaatacctcaaagcagaccgtgttctgcgaacgaatagatttgcctgccaccgacaatcagatggtcagggacacggatatccaccagctgaagcacctgaaccagtcgctgcgtgagggttttgtcggcctggctaggtgtcgtctcgccggaaggatggttatgcgcgagtatcaccgccgccgcgttgaagtgcagagcacgtttgaccacctcccggggatgcacctcggtgcggttaatcgtgccggtgaagagcgtttcatgggcaatcaactgattctggttgtccagatacaacacccggaactcttcccgctcaagcgcggccatatgcagtcgcagccattcacgtacggcgtgggtagaggtgaaggctacgccgggctcatgcaggtggcggtccagagccctgagcgcccgctgaatgagacgccggtcctgtggcgtcatctcgccgggtaaaaaggaaagctgtttcatctgttgctccttcggtcagtcgataatacgcagaatggcgtgagcctctggatgttgcatggcatactcccgcaggcggtaatagtgtgcggtcatcgcgtcacattctgtacggcaggcatggtggctatacgcaatcaggcagacagcaatacctgctgcttctgcactcatttgggcatcgttaccgttcaggcagttaaacagacgccatgtctcatcgttgtcaggctcgggggacataaatgcgccgccattgctgagggtgtagaacgaccagataccaccgctgtagccctcacagaagcggtccatccaggcgaagatatgcggctccaggagtagccactgcgggatagcgccaaagtactgtggccagaaatcgatacgctgttcatcggggaccggcgtgacggtcagttcaaattcgggttggttagcgggtgcgaggtcgtgctgcgtctgtgttgtcatgggtatgtctccgtcaataaaaacgccagcggcgatggctggcgtatggggatataaagtgtgttcggggaggtgaatgcgggtaaatgcttcgcgatcagcgggtggccgtgtctgtacggatgcctgaggtgcggatatagcggttaagaccttcaccggcatccggctcaaagttccatgcccgccagaccatccggccttcagtatcacgaaccaccagacggaagtgactgccctggtcgtcttcgagtgtgatattgctgtacgtggtagtgaccgcttgcgcttgtctccgggtgaaaggccccggtggcagcaacacggattgggtcattttcgggctcctgataaaagaaaaccccggcagcctgctagctgtcggggtgaatttgctggggaagatactactatcagtcgttgctgcagtctccgagagtggacagaactttctcagcgttcttccggtccgcagtgaaggtccctgctttgtggtcattgacgtagacgtcgaactgcccggcctcagagatattgctgatgaagtcaaaccaggcgttatcgccgttacgccagcccaggctggacggaataatgtactgctggtgatccatcactacggtgatagtagtgtcgtcatcgtgcgaactgaccatcttgtcatcggcaagggtaagaaagactgaatgctgatagaaaccattctggtccgggttccctgtgcagttgatggtaaacgtctttccgctggcttcggtcacgctgtattccgtattgccctgaccgtaaccctgctgccagaaccccgggatagcagaggcattaaagctcgcgagcagtacacccgccagcataaaccgacttagtgaaagtattgtcattcttgtctcctttgtcgttgttttattcctgattgtcagggttcgagggtatcagtagctgccccatcagtttgccgtcatgggcgtactcaaagtatttttctttggtatacgggtccgtcacctcctggtattccagtttgatgttatcggcaatacacagcgcattcatcagtggctggacggttttttcctgcatatccacgaggtagtagtaactgccatcctcgcagccatcgggcgactggcgggtacgtaaaacctgcaaggtgggaccggataagtagtcaacctgtgaccattcttcgctgacatcatcctggtggctgaccacatcactgaaacgcggtggggtgaggtccttaaatttactgatggccttcaggtcatcacttctgtcatcgcatgcgatgagaaacagagtggtggcaaccagcgccagcagaggcagtgttttacgtttcattatttttttcctgaaatcagacgaaccactttggcaaagacataaatgcccacgaaaatacccaccggcacgccgacgaacggtgtcagcgcgacactggcagcaccggctgcgccacctcccgtcagcagtgcggcaacagtggcaagggtcagggccgcgagactgtcggacaccccggttttgttcagaatgatgacgatgacaacaatggcgataatggcaatatccggactgatactccaggtccagatacatcagccgctcacgaaaatcacgccgcagcgtgcgcaccgacacaccaaactcagcggcaagcttacgcacactcagcgtttcccctgccaccagacggctgattatcagtgacagcctgacagccagccggtcatggcggcgttctgcctgtgtcatgagacgttctccgtgaaagttaactgactgaaaatgatgtgattactttaaagagggggtcggacagggtatggacaccacagaaactatttttcatttctgcaaaagccagaggcagcgggggttacaggccttccctcggtgagtgaggaccgtcagcacggtgcgatgcggacaggtggtgtccgatattaacaaagcagcaacattaaacggtcactgcagttgcgtgagcagggcttccgccatcacccacagtgcccggttaagtttcacgtccccgtcgataccgcgaacggcacgggtatgtgaccgtcctcctttggcattacggccactgagcccgcccttaatcaggttctcctgaatacgctggtacgtggtccacaggtcattgctctcatcctgccagcggcgaggggagaggatctgcgattcagtcaccggctggtggtcttcaccaaagcggtatgtgagggcggcttttgccagtgcctgctgtgccgggggtggcaacagcaacgactgcatggcatcccgtttctcctccacccggtcaaaaatccccagcacctcatacgcgccttcaatcacctgactcaccacgtcccccttgtgtggcacccgcacctcgccaaacgactcaccgcagacgagcccgttctgacaaaccgcacgaaatagtcccggcaacatctgatacgaactggttccatcgtgagagttgagtagaataatttccggcacctgtttaccggtgatctgcccttcccgccgcagacgcagcatatgctttgtatgttcacgacgacccgggtcacgcacgcgggtctgacaggcaaagaatggctggaagccttctcgctgtaggctgtcgagcagggagatggtgggtatataggtataacgctcactacgggactcgtgtttgtcctcactgaatacactgggcactacgcgaaacagctcttcacgggttaacggacggtcgcgacggataaggtttgctgcgccaaagcgcgaagccagacgggtcataagcagactcctcataacgggaaaacaaataaaagggatccccgtcgcatcggcgacaggggcagggaagtaacagggatgggttaaatactcagaagaagaaatcccagacggcgcgggccactgacaccaccgtggtgcgcacggcctgaatgacggcccgcaccggggcgggtatcaggggaaaggcactgatgctatcgagtacggccccgacggtttcaccaaaatcgctacgagcctgttcccggactaccgtcgtgcgaaaggaaggatggagttgcgacaccaccgggctggtggcctcacgtggcaggcacttaatcatccgctcggccatcaccttaagcccccattgtagacggaccgacacagcacacaccggatggacgggctggaacagctcatgcagcaggcagattttgcggctgatattctgcttctgcgccgtggacaactgtcccccaccgctggtaggttcggccttatccgactggctgataacaaacagcaccttatgccggtatacctctccaatcacctgatgataaaaatgttcatccaccgtcagcgcccggtcatcggccttaatcagccacagtaccaggtcgaggcgaggaagctgttcgcggtacagcgcagcatactcggtatcgcgagcgccactttcgcccacgccgggcagatccatcagcgttatatagcggtcgccgacttgcaggcgaaagcgcagtggctcacgtgtacaggccgccacatcgctgaccggtgatatatctccggcaaacagggcattgcacagactgctcttcccaacaccggttttacccataatgccgatcactggctcgtagttagttaactggttaatttgctgcagaagccgctctgatacccattgcggcagatcagcaagcgattgctgaaacgacttcaaaccttcagaattattcatcactactcctctgaaaaataataaaaaacggtagaatcgtgagattccgccgttaattgcgtatgttcagagtgatgatatatatctgaagattttttcaatcctctgcgcttgaggcagctgcgcgactgctggctcaggcaatgaatgagttataatagcagcatttactaacagggatttattgagagtatgagccgccgtgatacaccttaaaatctcaacccagcaaagtttcggagccgcgagcaaaagtgagagccttcacaaaataatgcttagtaataaagttactttgaattcagagccccgattaatgtgaacatgatcaacgaattttacccagattgagttcattcagtagccaggttttgaacacatcaagcgcagaatgcatgtgttggtgctgggggaaaaccaaataatgaccgatgtaatgtatttcgctggtactgtttacaagtgggcataccagtttaccgctagcgatttcacgttcagccagtagttttgattcaagcacaactcccaagccgtcaactgcggcagcaatcgccataaagctacggtcaaatcgaaggccataattattgggtggcgtcatcttattcgcctcaaaccatcctttccactggtacaactgcacatcgcactgaatcaatgtcaacgcatagagatcctctggtttctttagccgctcagccagttggggagaacacagtggcgtaagttcttcaacagcaagcgggatcttctcatagggtgatgggcggggttcaccgtagactatatcgagatcaaaatcatcctgttcaaaacgtgcatattctgtgctggctgaaagtcgcagatcgatgcttgggttctcacgtatgaacttaccaagacgtggtaaaagccattgatgggcaaaactcggtgcagtatgaaggcgcaaaggcctggattcatcagccgtcactaatgccaacccctgctgtaattcgttaaatccccgctgtatgtgctcaagcagtatttcaccttctttcgtcagcgtaatttctcgcgtactgcgctgaaaaaggcgtacatcaagcaagttttccagtttgcggatggcatggctgatcgcactgggtgacagttccaactcagaggcggccaacgcaaaagctccggtacgaccagccgcttcaaaggcgcgtaacagatttagaggtgcttttgctaagagcttcattcatgaatccttttcactagggatgaagtggtttactgaatttggccacctgaacagaggtgatatgctcacctcagaacaacacaggtgtcataatgaaaaaaagaaatttcagcgcagagtttaaacgcgaatccgctcaactggtcgttgaccagaactacaccgtggcagatgcagccagcgctatggatgtcggcctttccacaatgacgcgatgggtgaaacaattacgtgatgaacggcagggcaaaacaccaaaagcctcccccattaccccggaacaaattgaaatccgtgagctcaggaaaaagctacaacgtattgaaatggaaaatgaaatattaaaaaaggctactgtagattcaattggtcaacgcaacagttatgtgaaaacatggggttgcggaggttttttgaatgagacgaacatttacagcagaggaaaaagcctctgtttttgaactatggaagaacggaacaggcttcagtgaaatagcgaatatcctgggttcaaaacccggaacgatcttcactatgttaagggatactggcggcataaaaccccatgagcgtaagcgggctgtagctcacctgacactgtctgagcgcgaggagatacgagctggtttgtcagccaaaatgagcattcgtgcgatagctactgcgctgaatcgcagtccttcgacgatctcacgtgaagttcagcgtaatcggggcagacgctattacaaagctgttgatgctaataaccgagccaacagaatggcgaaaaggccaaaaccgtgcttactggatcaaaatttaccattgcgaaagcttgttctggaaaagctggagatgaaatggtctccagagcaaatatcaggatggttaaggcgaacaaaaccacgtcaaaaaacgctgcgaatatcacctgagacaatttataaaacgctgtactttcgtagccgtgaagcgctacaccacctgaatatacagcatctgcgacggtcgcatagccttcgccatggcaggcgtcatacccgcaaaggcgaaagaggtacgattaacatagtgaacggaacaccaattcacgaacgttcccgaaatatcgataacagacgctctctggggcattgggagggcgatttagtctcaggtacaaaaaactctcatatagccacacttgtagaccgaaaatcacgttatacgatcatcgttagactcaggggcaaagattctgtctcagtaaatcaggctcttaccgacaaattcctgagtttaccgtcagaactcagaaaatcactgacatgggacagaggaatggaactggccagacatctagaatttactgtcagcaccggcgttaaagtttacttctgcgatcctcagagtccttggcagcggggaacaaatgagaatacaaatgggctaattcggcagtactttcctaaaaagacatgtcttgcccaatatactcaacatgaactagatctggttgctgctcagctaaacaacagaccgagaaagacactgaagttcaaaacaccgaaagagataattgaaaggggtgttgcattgacagattgaatctacaaccgcgctcttgatgtcagactccctgaacagttctcgataatcgggaaactcagggcgcgttatcctgtggccactctctgccatgtgttcggggttcatcgcagcagctacaaatactggaaaaaccgtcctgaaaagccagacggcagacgggctgtattacgcagtcaggtacttgaactgcatggcatcagccacggctctgccggagcaagaagcatcgccacaatggcaacccagagaggataccagatggggcgctggcttgctggcagactcatgaaagagctggggctggtcagttgccagcagccgactcaccggtataagcgtggcggtcatgagcacgttgctatcccgaatcatcttgagcgacagttcgccgtaacggaaccaaatcaggtgtggtgcggtgatgtgacctatagtgtgcccggagttcagggcgggcatggatgcttaaatgaaccgcgagtctgtctggaatattgaaccggtaactcacgatgagaaacccaacaatcccaccgggtgtgacggtggagaacctgagcggcagtgacctgcggcatgcccgcagggtgatgtaacccgctgacaacggggattgaggcgagatcactaagccgagatgatcctcaaggttaagtactgaaaggttgaagaacatgaacccgttaatccgcctctgtgggttgaaaacgtcaccacggcctacgtgatctgacaggccgtgcaggaggaactggcagtgatacgtaagcactgccggtcgaaggtgttttgacatgtatgcgaaacaccggggcagcagcgtctatcacgcttgcgttgctgacttctgccaacttgcggcaagcaaggataaagagtgcgacgggcagcctcctcagtatgcctgagtccaggcaggtaaaccggggaaggtcagcgacggatgttaagggggcatggctccgatgacgcgctggctggcggagcttccgtagtagtccgcgatggggaaagcccattacatggcgaagggaagcagtttgaatgtgtttgcgacgtgaattaactgacctaacgaggtgaagacctttgataatcagcgaaatgcaacgcaagcttgccacatgggcagccaccgatccgtccctacggattcaacggctgctgcgtctgataacacaaccagaatggctggctgaagcggcgcggatcacgctttcatcaaagggggcccatacccccggcgttgatggcgtgaacaaaacaatgctacaggccagactggctgttgagctgcaaatcctcagggatgaattactctcaggccactaccagcccttgcccgccagacgggtttacatccctaaaagcaacggcaaactgcgaccactgggtatccccgcgttgcgggatcgtattgttcagcgggccatgctgatggcgatggagccgatatgggagagtgattttcatacgctctcatatggcttccggcctgagcgcagtgtccaccacgcgatccgcacggtgaaattacagctcacagactgtggtgaaacccggggacgctgggtgattgaaggcgacctgtccagttacttcgacaccgtacatcatcgactgctgatgaaggctgtacgccgcaggatcagtgacgcacgtttcatgactctgctgtggaaaaccatcaaggcgggacatatcgatgtcggtctctttcgggcggccagtgaaggtgtgccacagggcggtgttatatcgccgctattatcgaacatcatgctgaatgagttcgatcaatacctgcatgagcgctacctgagcgggaaagccagaaaagatcggtggtactggaataacagtatccaacggggccgaagtacggcggtcagagaaaactggcagtggaaacccgcggtggcgtactgccgctatgccgatgattttgtcctcatcgtcaaaggcaccaaagcacaggtggaagccatcagggaggagtgtcggggtgtgctcgaaggcagtctgaaactcaggctgaacatggataagactaaaatcccccatgttaatgacggctttatctttctggggcacaggctcattcgcaaacgcagtcgttatggcgagatgcgagtggtctcaacgatcccgcaggagaaagccagaaacttcgccgcatcgctgacagcactgttatggaaggtgcgaataagcggggaaattcttctcggctgactcagtcatttcatttcttcatgtttgagccgattttttctcccgtaaatgccttgaatcagcctatttagaccgtttcttcgccatttaaggcgttatccccagtttttagtgagatctctcccactgacgtatcatttggtccgcccgaaacaggttggccagcgtgaataacatcgccagttggttatcgtttttcagcaaccccttgtatctggctttcacgaagccgaactgtcgcttgatgatgcgaaatgggtgctccaccctggcccggatgctggctttcatgtattcgatgttgatggccgttttgttcttgcgtggatgctgtttcaaggttcttaccttgccggggcgctcggcgatcagccagtccacatccacctcggccagctcctcgcgctgtggcgccccttggtagccggcatcggctgagacaaattgctcctctccatgcagcagattacccagctgattgaggtcatgctcgttggccgcggtggtgaccaggctgtgggtcaggccactcttggcatcgacaccaatgtgggccttcatgccaaagtgccactgattgcctttcttggtctgatgcatctccggatcgcgttgctgctctttgttcttggtcgagctgggtgcctcaatgatggtggcatcgaccaaggtgccttgagtcatcatgacgcctgcttcggccagccagcgattgatggtcttgaacaattggcgggccagttgatgctgctccagcaggtggcggaaattcatgatggtggtgcggtccggcaaggcgctatccagggataaccgggcaaacagacgcatggaggcgatttcgtacagagcatcttccatcgcgccatcgctcaggttgtaccaatgctgcatgcagtgaatgcgtagcatggtttccagcggataaggtcgccggccattaccagccttggggtaaaacggctcgatgacttccaccatgttttgccatggcagaatctgctccatgcgggacaagaaaatctcttttctggtctgacggcgcttactgctgaattcactgtcggcgaaggtaagttgatgactcatgatgaaccctgttctatggctccagatgacaaacatgatctcatatcagggacttgttcgcaccttccggaggcgttatgagctggcggccctttttgtatctgattattaatccccacccgctattaagcgcccggcgcgggcatctgcgtctggtgcagggttgactttgcattctgttaacaaacgcggtataacaaaccttctttggatgtttagatgtccatacgtttagaaggttatatgcaaacaacacaacaaaatgcgccactgaagcgcacaatgaaaacgcgtcacctgattatgctttccttgggcggcgtgattggcacaggattattcttcaataccgggtacatcatttccaccactggagcggcgggaacgctgctggcctatctgattggtgcgctggtggtctggctggttatgcagtgtctgggcgagctgtcggtcgcgatgccggagaccggagcgtttcacgtttatgccgcgcgctatcttggtccggctaccgggtataccgtggcctggctttactggctgacctggaccgtggcgctgggttcgagctttaccgccgctggattctgtatgcagtactggtttccacaggtgccggtatgggtctggtgcgtggtgttctgcgcgattatttttggtctgaatgttatctccacgcgcttttttgccgaaggggagttctggttctcgctggtcaaagtggtcactatcatcgcctttatcatcctcggtggggcggcgattttcggctttattccgatgcaggatggctcgcccgcgccggggctgagtaatatcacggcagaaggctggttcccgcacggtggcttaccgattttgatgactatggtggcagtgaactttgctttttcgggtaccgagcttatcggcattgccgccggtgaaacggaaaacccgcgcaaagttatcccggtagcgattcgtactaccatcgcgcgactgattattttctttatcggcaccgtgtttgtgctggcagcgctgatcccgatgcagcaggtgggcgtggagaaaagcccgtttgtgctggtatttgagaaagtagggatcccgtacgccgctgatatttttaacttcgtgatcctgacggctattctttctgcagcgaactccgggttatatgcctccgggcgcatgctgtggtcgttgtcgaatgaacgtacgctaccggcctgttttgcgcgagtaacgaaaaacggcgtgccactgacggcgctgtcggtcagtatgctcggtggtgtgctggcgctgttttccagcgtggtggccccggacacggtatttgttgcgctgtcggcaatctccgggtttgcggtggtagcggtgtggctgagtatctgcgcctcgcattttgtttttcgtcgccgtcatctgcaacaaggtaaggcattgagtgaattacattatcgcgcgccgtggtatccgctggtgccagtattaggttttgtgctgtgcctggtggcctgtgttgggctggcattcgatccagcgcagagaattgcgttgtggtgcgggttaccgtttgttgcgttgtgctatggtgcttatttccttactcaaccccgaaacgcaaaacaggagccagaacatgtcgcagaataatccgttacgcgctcttcttgataaacaggatatcctgctgctggatggcgcgatggcgacggagctggaagcgcgagggtgtaacttagccgacagcctgtggtcagccaaagtgctggtagaaaacccggagcttatccgcgaagtgcatcttgattactaccgggcgggggcgcaatgcgcgatcactgccagctatcaggcgacgccggcgggcttcgccgcgcgaggtctggatgaagcgcagtcgaaagcgctgattggcaaaagcgtggagctggcgcgtaaagcccgtgaagcgtatctggcagagaacccgcaggcgggaacgcttctggtggcgggatccgtcgggccttacggcgcgtatctggcggatggctctgaataccgtggcgattatcattgtagcgttgaggcatttcaggcgtttcatcgcccgcgcgtggaagccttgctggatgccggggccgatctgctggcctgcgaaaccctgccgaatttttccgagattgaggcgttggccgagctgttgaccgcatatccgcgtgcgcgggcgtggttctcatttaccctgcgcgacagcgaacacctgagcgacggtacgccgctgcgtgacgtggttgcgttgctggcgggttatccgcaggtggtggcgctaggcattaactgtattgcgctggaaaacaccaccgctgcgttgcagcatttacacggtttaacggtgctgccgctggtggtgtatccgaactcgggcgagcattacgatgccgtgagcaaaacctggcatcatcacggtgaacattgcgcgcagctggcggattatctgccgcagtggcaggccgctggcgcacggttgattggcgggtgctgtcgcaccacgcctgcggatatcgccgcgttaaaagcgcgaagctgagggtttatcgggtctacatcgttcattgtaggcctgataagcgcagcgcatcaggcattgccggatggcggcacaagcgccttatccggcctacaaaaccacaaaacgttatgccgcatccgccagaacaaacatgccgtacggatggatttcaagataatactgctcgccgacgtccggttgcagacgcgtagcgttgacctgcaataatatctcctgcccgtgccattccaccgtcacttcatactgcggccccatataggcgacatggcggatcacgcagcgctggctctcttcgccgcgatcgctgagcgtgatcgcttccgggcgcacaccgaccatcccttcaccctgtgtaccaaagtgcagcgggcgcggcagatgatagccgtagatatcaacgtatccgtcgctgaaggttgccgggaacaggttggcatcgcccataaagctcgccataaagcgggaggcgggctggcggtaaagatcctgcggtgagccgatctgcatgatgtgtcccttgttcatcaccagcacagtatcagaaaccgcaaaggcttcgctctgatcgtgggtgacgtacagcgaggtgatatcaaactgcttttgcaactcgcggatcttgtcgcgcatgctgcgacgcaggttggcgtcgaggttactcaacggctcatcaaacagcagcactttcggcttgaggatcagcgcgcgggccagcgccacgcgctgctgctgcccgccggagatctgatcgacaaagcggtcttcgaatccttccagatccaccatcgccaacgcctctttgacgcgggctttcagctctgcgcgcggtacgccgagcattttcaggccataaccgacattctctcccagcgacatatgcgggaacagggcataggactgaaacaccatacagatatcgcgctgctgaatagagcgatgggtgacgtcttcgccatcaatgaaaatttgcccttcgctcggtttttccagcccggcaaccaggcgcaaaatagtggttttgccgcagccggacgggccgagcagcgtcaccatttgcccctgcgggatggtgaggttgatattgtcgattaccgtattactgccaaatcgtttagtgacgttgcgcagttcaacgaaatttttctgagtcatagtgcgctccattacgcctggtttttggcttttgaacgggaggtacgtgattcaccgatcagccagtcaaagatgaaaataatcgccagcatcaccacgatcagaatggaaccgtaggcaatcgctacaccgtattcgccatcttccacgcggttgaggatgtaagccgtcgctacgcgggtatccggcgtgacgaggaacacaatggcgctgacggtggtaatggcgcgcacaaagctgtaaatcagcgccgagaggatcgccgggcgcagcagcggcagcaggatgtgcgtaatggtacgcagggaaccggcgcgcaggctgagtgaggcttcatcgagcgatttatcgatttggcccggtaatgactccaacttattgatagtgttttatgttcagataatgcccgatgactttgtcatgctgctccaccgattttgagaacgacagcgacttccgtcccagccgtgccaggtgctgcctcagattcaggttatgccgctcaattcgctgcgtatatcgcttgctgattacgtgcagctttcccttcaggcgggattcatacagcggccagccatccgtcatccatatcaccacgtcaaagggtgacagcaggctcataagacgccccagcgtcgccatagtgcgttcaccgaatacgtgcgcaacaaccgtcttccggagcctgtcatacgcgtaaaacagccagcgctggcgcgatttagccccgacgtatccccactgttcgtccatttccgcgcagacgatgacgtcactgcccggctgtatgcgcgaggttaccgactgcggcctgagttttttaaatggcggaaaatcgtgttgaggccaacgcccataatgcgggcggttgcccggcatccaacgccattcatggccatatcaatgattttctggtgcgtaccgggttgagaagcggtgtaagtgaactgcagttgccatgttttacggcagtgagagcagagatagcgctgatgtccggcagtgcttttgccgttacgcaccaccccgtcagtagctgaacaggagggacagctgatagaaacagaagccactggagcacctcaaaaacaccatcatacactaaatcagtaagttggcagcatcaccgagaacacaaatgggctaattcggcagtactttcctaaaaagacatgtcttgcccaatatactcaacatgaactagatctggttgctgctcagctaaacaacagaccgagaaagacactgaagttcaaaacaccgaaagagataattgaaaggggtgttgcattgacagattgaatctacagcagctttttttaatatgtcccgttcgtcggtaacccgtttcagctctttctggagacggcggatctcggcctgagcatctgactgttctttattagtggaagaatccggaccgtacttctttatccaggcataaaggctgtgggtggtgatatcgagacgtgttgcaacgctggcaacagaataaccgagatcaacaacctgtttgactgcttcagttttaaactcttcgggataacgcttaccgctcatgggcacctctctttaagccattttaaatgactcggaggtgtctgttaaacccgtggcgattcaaaattgcgatatatacatacccatgactgcccagcgtatcggcttcaccagtcagcccgttacggtacagtgtgacacagtgcgcgtacctgggattcagctcacaggagagcagcatcagctccagatgtgcgacaaaatgcgggaaggcttcatccagttgtagagtctgcacctcactgaatgagccggtgaatccagcccggtcagccagaaaatgcagacgatgaccttcctgcaccagtcgtgctccgaaacacggtgtgatatctcgtttaagcccccaagtttgagtagagtctttattcataattttattcctgttaaagaagaccatgttcggcgaatgagaatatttgcctgccgccgacaatcaggtggtcggggacatggtgaacactttttaacatcctttacccatggtgatcgactttttcttcaggtcgatcacccccactttcgtgctgtaccaccacacctcgtagctgccgtcttcctgcatctccttcagcccgacccgttctcccctgaacgccttgcctgcgctcagacttacccctttcacgctcagctttccgctgatatccactttcctgaccatcaccccttcatcgtattccgggggcgttgtgttgccgctgtactgccgcgctgacggctgataccgcgagcccggtaccgccatatccagcgcctcgtgcgggcgttcaaggttatagaccgtccgccagtggtcgaaggcgcgctgcagttcaccgctgtctgcgaaccattttccctgcagcacttccgccttcaggctgcggtgaaaacgctccagcttcccctgcgtctgcggatgataaggccgggagtgccccacccggatacccaggcgcatcagccacagctccagcgccgtccaggtgccggtggtgtcgccccacggtgagccgttatccatggtcatccggtccggcaggccgtaacgctcaaacacgctgaccagctgctgctgcacggtctcgcgccgttcatcggtacagtgcgccaggcacagggaaaaacgggagtggtcgtccagcagggtgagcggatggcagcgtccaccgccaaaaggaaagtggcccttaaaatccatctgccagaggcggttcggcgcgtcgtgttcgaaccggcccgtggcgggaatgcccggtgaagcgcccggcagcaggccatggcgggccatcaggttatggacggtgctgaaggcgggcatggtgtgcccctggtcctcgagccagcgcttaatcttgcgggctccccagcgttcatgacggtcatgggccatacgcagcagggccgtgatgtcgtcagatgagcggttcggggaatggtgcggaatgcgcgggcggtcctgaagaccggcggcaccttcctgagcccagcgctggagccacttgtagccggtggcaggtgaaatgccgaagcgacggcagagggaacggatgttcgccccgtcctgcgaggcgaacaaaacaaactcagtacgtaatgacatggtatctctcgcatcccagggcataagcgactccataaacgggttcttatgccttagttgtaagtgtctaccatgtccccgaacaagtgttcactatgtccccggaccgtacaccccaaaggggagaggggactgcaccgagccatcttttccccctcgcccctttggggagagggccggggtgaggggcaatatgtgatccagcttaaatttcccgcactccctcttcccttccgatttacctctccttgttctgcgtcatagtatgatcgttaaataaacgaacgctgttctataatgtagaacaaaatgattcagcaaggagatctcatgccgcagtccgcgttgttcacgggaatcattccccctgtctccaccatttttaccgccgacggccagctcgataagccgggcaccgccgcgctgatcgacgatctgatcaaagcaggcgttgacggcctgttcttcctgggcagcggtggcgagttctcccagctcggcgccgaagagcgtaaagccattgcccgctttgctatcgatcatgtcgatcgtcgcgtgccggtgctgatcggcaccggcggcaccaacgcccgggaaaccatcgaactcagccagcacgcgcagcaggcgggcgcggacggcatcgtggtgatcaacccctactactggaaagtgtcggaagcgaacctgatccgctatttcgagcaggtggccgacagcgtcacgctgccggtgatgctctataacttcccggcgctgaccgggcaggatctgactccggcgctggtgaaaaccctcgccgactcgcgcagcaatattatcggcatcaaagacaccatcgactccgtcgcccacctgcgcagcatgatccataccgtcaaaggtgcccatccgcacttcaccgtgctctgcggctacgacgatcatctgttcaataccctgctgctcggcggcgacggggcgatatcggcgagcggcaactttgccccgcaggtgtcggtgaatcttctgaaagcctggcgcgacggggacgtggcgaaagcggccgggtatcatcagaccttgctgcaaattccgcagatgtatcagctggatacgccgtttgtgaacgtgattaaagaggcgatcgtgctctgcggtcgtcctgtctccacgcacgtgctgccgcccgcctcgccgctggacgagccgcgcaaggcgcagctgaaaaccctgctgcaacagctcaagctttgctgagccggacgataacgatgaccattgagaaaattttcaccccgcaggacgacgcgttttatgcggtgatcacccacgcggcggggccgcagggcgctctgccgctgaccccgcagatgctgatggaatctcccagcggcaacctgttcggcatgacgcagaacgccgggatgggctgggacgccaacaagctcaccggcaaagaggtgctgattatcggcactcagggcggcatccgcgccggagacggacgcccaatcgcgctgggctaccacaccgggcattgggagatcggcatgcagatgcaggcggcggcgaaggagatcacccgcaatggcgggatcccgttcgcggccttcgtcagcgatccgtgcgacgggcgctcgcagggcacgcacggtatgttcgattccctgccgtaccgcaacgacgcggcgatcgtgtttcgccgcctgatccgctccctgccgacgcggcgggcggtgatcggcgtagcgacctgcgataaagggctgcccgccaccatgattgcgctggccgcgatgcacgacctgccgactattctggtgccgggcggggcgacgctgccgccgaccgtcggggaagacgcgggcaaggtgcagaccatcggcgcgcgtttcgccaaccacgaactctccctgcaggaggccgccgaactgggctgtcgcgcctgcgcctcgccgggcggcgggtgtcagttcctcggcacggcgggcacctcgcaggtggtcgcggaggcgctgggtctggcgctgccgcactccgcgctggcgccgtccgggcaggcggtgtggctggagatcgcccgccagtcggcgcgcgcggtcagcgagctggatagccgcggcatcaccacgcgggatatcctctccgataaagccatcgaaaacgcgatggtgatccacgcggcgttcggcggctccaccaatttactgctgcacattccggccatcgcccacgcggcgggctgcacgatcccggacgttgagcactggacgcgcatcaaccgtaaagtgccgcgtctggtgagcgtgctgcccaacggcccggactatcacccgaccgtgcgcgccttcctcgcgggcggcgtgccggaggtgatgctccacctgcgcgacctcggcctgctgcatctggacgccatgaccgtgaccggccagacggtgggcgagaaccttgaatggtggcaggcgtccgagcgccgggcgcgcttccgccagtgcctgcgcgagcaggacggcgtagagccggatgacgtgatcctgccgccggagaaggcaaaagcgaaagggctgacctcgacggtctgcttcccgacgggcaacatcgctccggaaggttcggtgatcaaggccacggcgatcgacccgtcggtggtgggcgaagatggcgtataccaccacaccggccgggtgcgggtgtttgtctcggaagcgcaggcgatcaaggcgatcaagcgggaagagattgtgcagggcgatatcatggtggtgatcggcggcgggccgtccggcaccggcatggaagagacctaccagctcacctccgcgctaaagcatatctcgtggggcaagacggtgtcgctcatcaccgatgcgcgcttctcgggcgtgtcgacgggcgcctgcttcggccacgtgtcgccggaggcgctggcgggcgggccgattggcaagctgcgcgataacgacatcatcgagattgccgtggatcgtctgacgttaactggcagcgtgaacttcatcggcaccgcggacaacccgctgacgccggaagagggcgcgcgcgagctggcgcggcggcagacgcacccggacctgcacgcccacgactttttgccggacgacacccggctgtgggcggcactgcagtcggtgagcggcggcacctggaaaggctgtatttatgacaccgataaaattatcgaggtaattaacgccggtaaaaaagcgctcggaatttaattattttaagagataaaaccgtctgcggaatatttcccgcagacggctttgttgtttttgaaatttattaatttaaacaattagttgagatatatcgttggcgtcacaaaagcaaaataacgtaattcggaaataagatatgaccattgctggttaattgaatagctcattacactccattaacacgatgttgtaattcggcacactacataagggtgtaattctgatgacgcaattaaccatgaaagacaaaattggctacgggctgggagacaccgcctgcggcttcgtctggcaggccacgatgttcctgctggcctatttctacaccgacgtcttcggcctgtcggcggggattatgggcacgctgtttttggtctcccgcgtgctcgacgccgtcaccgacccgctgatggggctgctggtagaccgcacccgcacgcggcacggccagttccgcccgttcctgctgtggggggccatcccgttcggcatcgtctgcgtgctgaccttctacacgccggacttctccgcacagggcaagatcatctacgcctgcgtgacctacattctcctgaccctggtctacaccttcgttaacgtgccgtactgcgccatgccgggcgtcatcaccgccgacccgaaagagcgtcacgccctgcagtcctggcgcttcttcctggcggcggcgggctcgctcgctatcagcggcatcgcgctgccgctggtgagcatcatcggcaaaggggacgagcaggtgggctacttcggcgccatgtgcgtgctggggctgagcggcgtggtgctgctctacgtctgcttcttcacgaccaaagagcgctacacctttgaggtgcagccgggctcgtcggtggcgaaagaccttaagctgctgctgggcaacagccagtggcgcatcatgtgcgcgttcaagatgatggcgacctgctccaacgtggtgcgcggcggggcgacgctctacttcgtgaaatacgtgatggatcacccggagttggcgacccagtttttactttacggcagcctcgccaccatgttcggctcgctttgctcctcacgcctgctgggccgcttcgaccgcgtcaccgccttcaagtggatcatcgtcgcctactcgctgatcagcctgctgattttcgtcaccccggcggagcacatcgcgctcatttttgccctcaacatcctgttcctgttcgtctttaataccaccacgccgctgcagtggctgatggcttctgacgtggtggactacgaggagagccgcagcggtcgccgcctcgacgggctggtgttctccacctacctgttcagcctgaagattggcctggcgattggcggggcggtggtgggctggatcctggcgtacgtcaactattccgccagcagcagcgtgcagccggttgaggtgctcaccaccatcaaaattctgttctgcgtggtgccggtggtgctctacgcgggcatgttcatcatgctgtcgctctacaagctcaccgatgcccgcgtggaggccatcagccggcagctgattaagcaccgcgcggcgcagggcgaggccgttcccgacgccgcgacagccgcatcccattaaccggaggcaatatggaaatcactaacccgatactcaccggcttcaacccggacccgtccctgtgccgccagggcgaggactactacatcgccacctcgaccttcgagtggttcccgggcgtgcgcatctaccactcccgtgacctgaaaaactggtcgctggtcagcaccccgttggaccgcgtgtcgatgctggacatgaagggcaacccggactccggcggcatctgggcgccgtgcctgagctacgccgacggtaaattctggctgctctacaccgacgtgaagattgtcgactcgccgtggaaaaacggccgcaacttcctcgtcaccgcgccctccatcgaggggccatggagcgagccaatcccgatgggcaacggcgggtttgacccgtccctgttccacgacgacgatggccgcaaatactatatctaccgcccgtgggggccgcgccaccacagcaacccgcacaacaccatcgtgttacaggcgtttgacccgcagaccggcacgctctcgcccgagcgcaaaacgctgtttaccggcacgccgctctgctacaccgaaggcgcgcacctgtatcgccacgcgggatggtactacctgatggccgccgagggcggcaccagctacgagcacgccgtcgtggtgctgcgttccaaaaatatcgacgggccgtacgagctgcacccggacgtaacgatgatgaccagctggcacctgccggagaacccgctgcagaagagcggccacggctcgctgctgcagacgcatacgggtgaatggtacatggcctacctcaccagccgcccgctgcgcctgcccggcgtgccgctgctggcctccggcggacgcggctactgcccgctggggcgcgagaccggcatcgcccgcattgaatggcgcgacggctggccgtacgtggaaggcggcaagcacgcgcagctgaccgtgaaaggcccgcaagtagccgagcagcctgcagccgttccgggcaactggcgggacgatttcgacgccagttcgcttgacccggagctgcagaccctgcgcattccgttcgacgacaccctcggctcgctcaccgcgcgcccgggcttcttacggctctatggcaacgactcgctcaattcgaccttcacccaatcgaccgtggcgcgccgctggcagcacttcgccttccgggcagaaacgcggatggagttctcgccggtgcacttccagcagagcgcggggctgacctgctactacaacagcaaaaactggagctactgctttgtggactacgaggagggacagggtagaaccatcaaagttatccagctcgaccacaacgtgccgtcgtggccgctgcacgagcagcccattccggtgccggaacatgcggagagcgtctggctgcgggtggacgtggatacgctggtctaccgctacagctactcgtttgatggcgagacgtggcacaccgtgccggtgacgtatgaggcgtggaagctgtcggacgactacatcggcgggcgcggcttcttcaccggcgcgtttgtgggcctgcactgcgaggacatcagcggcgacggctgctacgcggacttcgactacttcacctacgagccggtctaacggctcaggccgggtagcccagcgcgcgcgagagcgcgagcccggcctgctgaagctgctcgcggaaattagccagctccgcgtcgtccacgcgggaggtcagcgtcgacaggctcagggcggcgatgacgcgggactcgtggttccacaccggcaccgccacgcagcgcacgccctgctcgttctcttcgctgtccagggcgtagccttgctcgcgggtctgcgccagggcgctcattaaggcttcgcgagacgcgagggtggcgggcgtaaaggtagtgtactgatagccctccagcagggcgttcagctcggcctcgcccagccaggcaatcaacaccttgccgatggcggtggcgtgcaccggcaggcggcggccgatgcgtgaataggcgatggcggccagcttgccttcaatcttctcgatatagaccccttcacgcccgtccaggatccccagatgggtggtctgcccggtccgccgggacagctccgtcagccagccttttgccttctgccgaatatcgatggagcccacgacaaaatggccgcgctcgaccagcttcatgccgaggcgatacttgccgttctccgggttctgatcgatatagccgtgaagctgcagggtttttagcagcgagtggagggtactcttgctcagccccatcagtttgctgatgtcggtgatcttaagctcggtggcctgctcgttgaacaggtcgaggatctgcaacgcacgttcaacagactgaataatcggcataatgctggcatgtccacgctggaattaaggcgaaaacgtacctttttcgggatgaaaaatcaatgaaatggagccggtgttctccctctccctgtgggagagggccggggtgagggcaccaacgcgcagcggacccaatcactccccaagcgttgccatcatcaccgccttaatcgtatgcatccggttttccgcctggtcgaacacgatgctcgccgccgactcaaacacctcgtccgtcacctccatcccgccgtgcagatcgaactccttcgccatctgcttgccgagcgtagtctggtcgtcatggaacgccggcagacagtgcaggaacttcacgttcgggttgtcggtcagcgccatcatctgcgcgttcacctgatacccgcgcagcagcgcaatccgctctgcccacttctctttggcctcgcccatcgacacccacacgtcggtatagataaagtccgcgcccttaacgcctgccgccacgtcttccgtcagagtaattttcccgccgtgcttctccgccagcgcgctgcactccgccaccaggctctcttccggccagcaggctttcggggccaacaggcgcagatccagcccggtcagcgccgccgcttccagcatcgagttgcccatgttgttgcgcgcatcgcccgcgtagaccagcgtcatctcgttaaacgccttgcccggcaggtgctcctgcatggtcatcaggtccgccagcagctgggtcgggtggaactcgttggtcagcccgttccacaccggcacgcccgcatactgcgccagcgtttcgaccacttcctggccgtgaccgcgatactgaatgccgtcatacatccgcccgagaacccgcgcggtgtccttaattgactctttatgcccaatctggctgccgctcggccctaaataggtaacgcgcgcgccctggtcaaatgcggcaacttcgaaagagcaacgggtacgagtcgagtctttttcgaagatgagcgcgatgtttttaccggtaagcttctgtacttccttgccattttttttatcggctttgagctgtgcggcaagggtcagcagagaagtgaactgtgcaggggtaaagtcgagcagtttcagaaagtgttttttgtataaatcggacattttatcctcgcatggcgaacgccacttattgaattaaaattcactttatatgtgtaattattcatttgcaaccccatttcacaattctttcttacaaaggtggaggcaaacccgtccgtgtgtgaaaataatcgtatctgcctccgattctctgcagaagcagaaagacattggatcgaattctacaaccaggtcgagtcagaaatgagaatgattggccttctttatgattttaaggattatgcttctaaaatggcggagaacatggcgaggcttgctgccttacttcattacttcagcggtgatggaggcgatatatctgttaccgggtaatgactccaacttattgatagtgttttatgttcagataatgcccgatgactttgtcatgctgctccaccgattttgagaacgacagcgacttccgtcccagccgtgccaggtgctgcctcagattcaggttatgccgctcaattcgctgcgtatatcgcttgctgattacgtgcagctttcccttcaggcgggattcatacagcggccagccatccgtcatccatatcaccacgtcaaagggtgacagcaggctcataagacgccccagcgtcgccatagtgcgttcaccgaatacgtgcgcaacaaccgtcttccggagcctgtcatacgcgtaaaacagccagcgctggcgcgatttagccccgacgtatccccactgttcgtccatttccgcgcagacgatgacgtcactgcccggctgtatgcgcgaggttaccgactgcggcctgagttttttaaatggcggaaaatcgtgttgaggccaacgcccataatgcgggcggttgcccggcatccaacgccattcatggccatatcaatgattttctggtgcgtaccgggttgagaagcggtgtaagtgaactgcagttgccatgttttacggcagtgagagcagagatagcgctgatgtccggcagtgcttttgccgttacgcaccaccccgtcagtagctgaacaggagggacagctgatagaaacagaagccactggagcacctcaaaaacaccatcatacactaaatcagtaagttggcagcatcaccgaattttcagcccggatgtttcacgtacctatgtcgaatatctggccgataaggttgcggatcgagaagaggatgcagaggaatatctggaagcaatcatggaggctcgtgttaccgttgctggcatggggctggtgatggaggtgcaggattacttcgatggcgaggccgatagactggcgaaggcgtggctggccgagtacacaccgcaaatcaagtcgttgaaagatgagcgtaaagaggcctatcgtcaaatcgtcgaaatgagtaccgaaccgcaggatgtggatctggtcaggccggcgaacaagtttgaaatgaccagggtgcgtgaaggtgaaaaggaagctgaccttccagtctggaaacaccatttgttgtgtgacgaaagcgggaactatccggctctgttgaaccattgggaaaccaaggtttttgagatcgaaaccaaacgtgaaggatttgctttctggtatcgtaatccacagtacacagggcagtcgtcactgggaatcgcttatgttgaagctgaacagtacaagattgttcgtcccgatttcctgttctttgccgaacaggatggcaaaatggttgtggacctggtagatccacatagcctacatctggctgatgctttgcccaaactggaaggacttgcgctatatgccgaacatcattctgatgcttacaggcgaatcgaatctgtcgccgaagtaaagggtaaattacgagtgttagatttgaaacggcaggatgtgcaggatgctgttgctaccgctgaaaatgcagaaacgttatttagtagcggacttgctgatgactatcagtaatctatagaaaattgcgtaacgaaactgcattttagtaattttttgaaacaatacaaataaggccttctcactgagaaggccattaccgacttacagttcgatttggctacagccgaagttacggtctccttcaccaaacactttgctttcaactttggtcaggtagtccagtcgggttaacagcgcctggtagttctgctggaagtcagtactattggtgtctagcacatacttacagttttcaggaaaatggaccagaccagggtgatcgtctctctccagtctcagggcgctgtaccaggctcctgtgatcatccctctaaggttatcgtcctgatcgtaatccccgaggtggtagtaagcgtctttgttgaacaacaggcaaatgtgatagtggcatttacctgattcagaatactctttcgcccatataataaataaagggcaacggtaaatgcgtttatcctcacgcaccttacgggtacggtcagcctccagcttagctctgagggattcacgcatccgggatatcaccccaggttccaggttagggaagcaacagatattgtcaccgttatcaactattttgggatagtggagatcgacacgtacagcaattaacctaggataccggttagtcaaataacataataatttattaatcttactctgatattcgaggatatgtactccatgagtaccttgatatgttttcataatatatacctgtatttggtcctacggtctatagcagaccgtacagggatgccatacaggcagggctattcctggtcactgttgtcggtatatactggtatcagattttagtacggacatactgatctgattactactcttactggtgaatacaggtagtaagagtacacaatgccattatataatacctatccaacatctaaatttgagacgaaggtagccccagcctgtgatggctgttaaaaagttactctgcaattagcttctggaattaaccgatgattccgttattccagtgccgcttcacagtcgataaactgatactcaatttctttgcaatctcagcctgagtaaatccacctttcttaagtattgtgatatcacgtcggtatttgcttccctcctttcgtcctaattttttcttaacatgtcgatatcggcttttagttgatttcagattgtgaatgtcaatcgtatcctgacgagcaatcaaaaaagacaagcaactttcagcagaaggctctatccttgaagctggatggtagctgtagataaacatttctttttgaaggcaaaaaaataaaatattctgtaagtcctccacagttctgccaagacagcttagatctggaatgacaagcgtgtcctgccggttcatttcatgatgaatcaattgtctgagtaaacgttgctctgaaacaacctctttaatatctacctgctcgatcacaacatgttcaggtagaatattaaatttttggcatatctcagcaagtgagtgatgatctgtaatgctttcttgctgttcgctactgcatatggtgtaaaaaaatgaacgcatctgatgcactccggtgtcataaattattttttgatacctgaataatgtcattttgcataaaaaacaaccaaaaatagagagtgattgccagcgatactttaactggtaaagtagtattttacctctcataattgtttgtccttctttgttacctcttaggttctgctctcttgtgagtatgggtttataatgatgtcatccggtacattaacacggttggaaacatctgttttgcggagcactggcagcataaccaccatttcattgacatggtaaatatcaatccaacaaacaaccggataaggcataacaatcccctttcttctaagaacttcatttatcccgaatataatcaattgggatgttgacaagagtagagcctgcccggcatcaaagtaataaccctcaaaggttgttctatgaataagaataatgtttgaatatcctgagacactttgatgctttacatcaaaatgtctttgattgtaaatgtaaatggctttttccatatcgtaattttcccttagcgaggatagcctttcacgtataactgttttttcatctttccccatgaattcatcattagcgttcagttgaaagtaatctgcaatggggatttttaatggactcatgatgttcgttttccagattaacgaacagtactcttccagagttacttctgttttacctcggcttcgattgatgctttcttttatagagaactttaacaggtcattttttatttcatttattgaccagttatgacgattgcatttttctaatatagggatagccaaatccacaacttccgctattacggaagagtgagatttatttgttagtctggcataatgatcaattactcctaatgaagattgatttttgaacgtgactgagtgtttttttatgggagtagtctgtactacctgtgactcattgtttttgccttgacaaggtttttttcctggtagaacgctgctcatctcaaaattagtaacactattagacatttttaaggaaacctctttgttatctcaatataaaactactatctgaaatttctcagtgttgccccatttttctcggggcaacatcgctataaatcaataaaattaaatctgtaatttattacagactttctcgtacagaaaatgtatctataaaatcgaggacatctttacgtaaccagtaatggcggccattgatttgttttgggcgaggtagcccctcaggcaatttgtcctgacaaagccatttacgaatggtttgagatttgtagctaatgattttagctaactcagctgttgaaatgagctgtgattgagatgtatccgggagtttgaatgcgctcattttgccacctcagtgattgagatattggcaaagaaagctttaagcattattgaattagtaggggtagtaatgaaggcagaaggaaacgtttcgggctcggggtcggggtcactaccatcacctgaatctgatgataaggcacttttagctgatttagccgtactgtgatgcgatctggatgcctgatttttacatgacatcagacgcgcgagaaagttagtagcattttgcattctttgtttaagatgtaaaattttcagtttggcgcatgcgacagacttgcgaagagctgagtatgttcctttgagatactcgacaacctcttccatggacgcaggatcgttaaaggattgagttgttttacttgaattaatacaccagcgagctctgatagctgccagagtgggttctatggatacagttgctggggttgccattggcttatctcctgtgtagttgctgtatcattgactaaactgtgtattacgatacatgaaaatctatcttgatcaatagttgatgatattttgtaatatgttgatttttaatggaatcaacgcatatcaacgttgttttttatggtaatacctgcttcatttaagatccatgtctcaattttctcgtgccattttcgtaacagatctaacggacgacggcgatagtgtttttcggcaagagcgctgggtttgtgtcccataatttgagcaacaataccagtgggaacttcaacccactcggccaaagtaccaaaactacgacgtaaaccgtgaaggctgatatgtggtaactcagccagcactaatgctctgttgtgcgctgaacgcggctcaataattttgccacttttactgttacttctgaaaacccaaccctccttatttacgtcagaatttggggattgcgctagtacatttaacaattcagaaacataaggagtgagagggatgatacgttcaccttcgatcttgtctttaattcgcatgcttgaccatttgaaatctacgtctgaccagcgaagcgacgcaatttcttcacgccgagcaccagtgagcaaaagtacttggagataggccgatgcaataggattattgaggctacgcacggcactaaaccagctttttagttgttccttttgcaggcaatcatcagctttactcgctgacacgggaaccatttttcttacgttgtaatcttgtgccagatcgccaggaatgatcccttgatattttttctgataattactccatttgatgaaagcacgtagtaggcgataagcgtgagcagtgacggtaggtctattttgcctttctgtactcagccacgctgctatgtaatctggggttagctccgataacggcaggttgagcaaactagccaatggtccagccgaagtcgggccttggcctctttttttactttcgcctccacgactggacaagttaatgtgatcggcaatgtatcgagtagaatatgggcgtttagtttttgcactgataccggttctcaattcttgaagatagtcttcccaggcgacggagaaagtcacttttgttttacgtgattctgcctgcagggattctgcttctgcgatttttacagccttagcaattcgtggatctatccctgtatcgatcaatgtttgtaaccgtcttgcctcggctctcgcatcatcaatcttccagtcgttaatgttgccaatagtcatgcgaagggttttccccgcatatacgctttggaatacaaaggcttttgctccgctagttgctcggcatgccagggttgttacatctgcatcccaaagaaaagtttgttttttcccttccggtaaggtgaatctgcgaagtctttcgaaggtaaatttttgtcttgaaagcgccatttttcggctccagttgagaattgctgtcttacaataatgtaactgctggtgtaagtaaatggagggaataaacatcaacttttgttaatttcaatcaacgggtttattgctataacttggtgttttataatataaagtatgttgttttgattgattgctcaagtagttaaaaatgcattaacatcgcattcgtaatgcgaaggtcgtaggttcgactcctattatcggcaccattaaaatcaaagagttaccccatatttaaatacaccacgtttcctcctgtgccgtatttgtgccattgtaaccttggcaattcatcaaaatactgttctgacatcaggcagtgcaggtgcagacatttaagccaattgctgccgccattctttgacgtagtcaatcagggcgcggagctttggtgcaatattgcgacgctgtgggaaatacagatagaagcccggaaattgtggaagaaagtcatcaagcagcgatacaagcttaccgctttcaatatatggcctgaaagtttcctgagtggcaattgttattcctccgccggcaagagccagcctcaacatcagacgcagatcattagtcgtaatctgcggttcaatcgcaaggtcgaaagttctcccgttttcttcaaatggccagcgataaggcgcaacctccggggactgacgccagccgatacacttatgggtatttcccccggaggcgagaaagcactctccacgcccggccgcaaggatcaggacgacgggggcaggcatgaatcctcctcctgatggagacgtacagaggcgacttctgccagcacggagagtgccagagtatgcgcatcccgggctttggggaatatcccgacgggtgcccggatttgcgttgtttcctccctggaccatcccagctcgtggagcttttgcagacgtaacgtgtgggttcgatagctgcccaatgcgccgagataaaagggttttgcttctcgcgcggcctgcaacactggcagctcccggttgagatcatggcacagcaaaatgaccgccgtatcggtatcgatctgagcgctggctgaggccggaaaaagatcgaagatatggctgtcatagcctgtggctgctgcaagactcgcggttgcctgcgcctcaagagaacgtccgtaaatcatcagcctgacgcatggcctgaaccccacctcaaagccattgagattccagcccgtccgggtttgcgtgggcaggcacaccagcgattgtgcttgcggatcgtagcgcagccccaccggttttctctgttccaggcggttcagcacggcgagcagaggctgtgccgagcgtagtttatggagcgtcagcgtgatcccaccgccgcagggcagaacgatgtcaaaccacggcgaaccttcgccatagcgaatttcgcgatcgcggcctgagcccatcatctccagcgcttcaaaagcggcagcggcctccacgcagccgccagagacaaaaccgcagtaacgaccatcttcgcgcaccaccatctgcgccccgagcgggcgcgccgcgccgccgcgtatctccaccagcgtcaccagcaccgctcctttaccggacattagcgcctctacggcgaagcgcagaatggtccggtggtcatcggtgagaaacgcctgctctggcttatgccagtgttcgtctttgtcaaaaagcgggtatgacattgttcctccttaaaccacatccggcagcttatcgagcagcttatccagagtgatgggataatcccgtacccgaataccggtggcgttatacaccgcgttggcgatagccgcgctcacgccgcacaggcccagctcaccgacacctttggccttcatcggggaggatatggggtcggtatcatccaggaaaatcacctcctgttttgggatatccgcatgaaccggcacctcataccccgccatatcgtgattaacgaagtagcccaaacggtcatccaccgccagctcctccatcagtgccgcgcccatgcccatagtcattgcgccaatgacctggctgcgcgcagttttcggattcaggatgcgtcctgcagcacacacagcgagcatacgccggacccgaacttctcccgtcgcgctatgcacgccgacctccacaaaatgcccggcaaaggtcgactgctggtactctttgctcagtgttccgaattcaatgctctcttccgctgtcagtctgccgcctgcggtggcttcatgtagcgtggcgcttcgggtaccgttggtaatcttgccgtcggcaaactgcgactgctcaggatcaaacccgactgccgaggcaatcatttcgcgaagcttcatacaggcggcgtaaacgccggaggtggaggtattcgcgccccattgtccaccagaacccgcagaaaccgggaaactggaatcgccgaggtgaaccgcaacctgctccagcggtacgccaagcatttccgctgccgtctgggccagaatggtgtagctgccggtgccaatgtcggtcatgtccgtttctacggtaacggtgccgttttgttcgaggtgaacccgagcacccgatttttccagcagattattgcgaaagcccgccgcaacaccgtggccgactagccactccccgtcgcgcacctgtccgggtgtggcgttgcgctgcttccagccaaatttatccgctccggtgcgcaagcactcgataagctgacggcgagagaagcagcgcgtcgggtcggcggggtcaacctgagtgtcattcaggatgcgaaactcgacgggatcgatgcccgctttttccgccagttcgtcgatcgcgatttcgagcgccatcagaccgggggcttcgccgggcgcacgcatggcgttcccttccggcaaatcaagcgtggcgagccgcaggccggtatgacgattcgccccggcgtagagtaattcgctttgctgtaccgccgtttccggcgtgccgccgggcaggtttccagaccagctttcatgtgagatagcggtgattttcccgctctggtcggcaccgatacgcaagtgctgaagggtggcggggcggtgcgtggtgttattgggaatagaggggcgggggagcatcactttaaccggacgtttcaccgctcgggcggcgagggccgccagcagcgcatcgcttctcaggaacagcttgccgccaaaccctccgccgatatacggggagataatacgcacattctccacgggaactttcagcgtttttgccagatcggtgcggcaccagtcaatcatctgatttgaggtccagagggtaagcttatttccatcccagacggccatcgaggcatgcggctccatcgccatatggctctggtccggggtcgtgtaggtagcatcaatcttcaccgcagcggaggtgaaagccccgtcaaagtcaccgacgtttttgtcgggcgtgtcttccggcggctgattgacggcctgtttttcgtccgccagggagtaagctcctttattacggcgatagtgtgcctgcaccagcgaggccgccgctcgcgcctgttcgaaggtctcggccactaccagcgcaatggcctgatgatagtgctcaatagtggggccgcctaacagcctggcggtgtttttgtcgcctttgccgagtgccccggcgttactggcggtaatgacagccagtacgcccggcgctttttgcgcggcgtccgtatcaagggcggtgaggcgtcctttggcaatggcggaaccgacgatatagccataggcggcgttgggggcttcttcatgccattcgtaggcgtagcgtgccgtgccggtagttttcagcggtccgtcgatgcggtcatggggacgaccgacaaccttcagctgatcgatcgggttttcccctgcgggtttatcaaatttcatgcctgtgccctcgcttcagccagtacggaggcaagcgttcgcttcgccaacaggagtttaaaggtgttttcagcggtgggatgggcgctggcgaacagcgtgtcatatacggcctgcgccccctgggatagctgagcatccgcagcctcaatgcgccagggcttatgtgctactccgcccagcgcgacgcgcccgctgccgtcaggctgaataatcgccgcgaccgataccagggcaaaggcgtaggaggcgcgatcgcgcaccttacggtagatatgttttccgccgagcggtggaggtaacgtcaccgcaacgataagctcaccgggaagcagggcggtttcaatgtgcggcgtttttcccggagggtgataaaaatcagccagtgtgatactgcgagtctttccctccggcgtgatggtttccaccaccgcatccagcaaccgcattgcgaccgccatatcgctcggatgggtggcaatgcaggcttcgcttacgcctaccaccgcgtgctgacggctaaagccttcaagcgccgcgcagccgctcccgggcaggcgcttattgcagggctgattggtgtcgtaaaaataggggcagcgcgtgcgctggagcagattacctgcggtggttgcctgattacgtaactgaccagacgcgccagcgagcagggcgcgggagagtaccgcgtaatcacgacgcacgcgctcgtgagccgccaggtcggtgttccgtaccagtgcgccgatgcgcagcccacccgcgtcggtcacttcaatcttatcgagcccgaggccgttcacatcgataaggtgggtgggcgtttcaatttccagcttcatcaggtccagcagattggtcccgcccgcgataaattttgcgccgggtacgcgctgagcgctaagtgccgcctcggctggggtattcactcgttcataggtaaacgccttcatgattttatctcccccgcagcatcttcaatggcggcaaggatgttagcgtatgcaccacagcgacagatgttgccgctcatacgttcacggatctcatcggcagttgtttctggagcggaaaccaaatcgaccgtgacgtgactgggaatgccgtcctgaatctcttttagcaccgctactgatgagcaaatttgcccggaggtgcagtagccgcactggaagccatcatgcttgataaaggccgcctgcatggggtgaagattatctggcgaacccaggccttcaatggtggtgatctcggccccctgatgcatgactgcaagcgtcaggcaggcattaagcctgcgaccattgaccagcacggtacaggctccgcactgtccgtgatcgcaacctttcttggtaccgatcaaatgcagattttcacgcaaagtgtccagtagcgtggttcgggtatccacctcaagctgctcggttttgccgttcaccttcagtgtcaggggcattatctctggcgcgggtgtagctgccggaacgcttgccgccagcgtagaatgaggataaaccacggcggtcgccgctgttgcggcgctcactttaatcagatcgcgacgggtcaaacttaaatcgtgcggctcgtgcttcccaacccgattatcttcggggtattcgccttggttgctcataccaggcctccggtattctaaaggggaaaataagagtgcgttgcgagagtgctgatgcttttttaaacgttaagcatagtcggcgacagcaggaggattattcttaaaacgcgaatgcagctatgagcccggctaataaattcatgttcgccgggatgttgatgatgatgggagctggtttattgctttagttgtacgatgcaaaaaccaataaggaaacctgtgattttcagctctacatcaccctgcaaatctctgtcacttctaatataaaaatagggagaaatgatggagcttatattcattggcgattaggaaactatcttgttatacaaaacaatacagttctttacatttgccttgttttatgaatactcctgaagaggtgtataacataatggtacaagcagggtagatatgaatatatttgaacaaactccaccgaaccgcagacgttatggtcttgctgcattcattgggctgattgctggcgttgtttccgcattcgtgaagtggggggctgaagttccattgccgccacgtagcccggtggatatgtttaatgcagcgtgtggcccggaatcattaatcagggctgcaggccaaattgattgctcgcgtaattttctcaatccaccgtatatttttcttcgagactggttggggctgacagatcccaatgcggctgtttatacctttgccgggcatgtctttaactgggttggtgttacgcacattatcttttcgatagtgtttgctgtcggttattgtgtggtcgctgaagtatttccaaaaattaaactctggcagggcttactggcaggtgctttagcccaactttttgttcatatgatttcattccctctcatgggactgacgccacctctgtttgatctcccgtggtatgagaatgtttctgaaatttttggacatttagtctggttctggtctattgaaattattcgcagagatttacgaaacagaattactcatgagccagaccctgagatccctttaggctcaaacagataatgcattgaatgataaaaatggcgcaaatacagcgccatttttataggttaaaaacattgctttttatattctgatgcagatagtcagtgagtatatcgcgctacttcaggatgatgtagatccgaagaacgctacagaagagaggcattgttgctggcaaatagaagaagtatcgggttttgttacccctgaaaaacgaagccccgctattatcgctggcggggcagtgcaattaattattgtatgtttataacggtgtcagcccgtatttagcccttgcacgattgcaagcctcattgacgactccgttctcaccagacatggcgaattctctgcatgtggacgatcgatttttatatatcgtgcagcaggcatttttgcccggggttcctgcaagggcaatacatcgggggtttttctgattggtaccgctcatgcatcggtgaaaaggggatatttgttcagtgagcctggcgggaatagtaccgccagcatcgtcggcttcggcccagtaaaaagagacgcggaaaaatgcacaacaggcaccacacgtcatgcatggattcagattgctcataattcaccagtacagctaaaaatcgtaaagagaacagcggtacatcgtatgtaagaacgtaccgcggttggctggggaactttcgatagtgtgagtattgaatgatttccagccgttaccgattttacgtactaattcgtgattaaaccactcgttagcaggctgcctgatacctttccgtgtctcctgaacactatggtgtgcatatgagaaagcccatcgttacaggtgatattgacgatcgcttccacatcatttaaacgatttttggggctctgaggtggaattcttccctcgaccgatggataagtcttagtccgccgaagggggcttagccggacaggaatcgctaatcttaatgaatttgtcgttatagaccagatagtgattccccggctgacgtaactcaggctgatgaaccacgtctcccggacgtagataccaggcatcgccttcctcttcggtcgaatcacatcctggcttaatcagtagcttaaaccatgtgttgccagtgttacttaccgttcctgtcaccttgtcgaaggaccatttaaactgaacctgacgtggtcgtactaccagaatggtatccatcaccaccaccggctccgtgctgaccacgccgccggttgggctgcgtcttgtatggttacgagtggggacctcgcgaaatgagacccggtagtagcgctcgcggttatcccgtggaccatgatagtaaaatttaaaatactcgctctcaccagcctgcaacgccagctggcggggggcgaaaagcagttcaccatccaccggtcgggtgcgcaattcactgctgcccgggctatcaatagcactgatggcaatacggtatatccgtgcgcttttgttgttattcactacacgtttgctgacaaagtcagtctcggacggcagcgaaaatgtcagattgccgaccgaaatcgcctgtgtcaaaggtgccgccagcatacagaccgctgtcagcagggccttagttaatgttacgccacgtcgcctgaacatgaatctctcctgaagcgctgacttcgccaaaccagccgttatcatctaccgtacgcagcgaaatggcgttatccattggaatcgaaaatttgactgtggtcttatccatctgccccacttcgccagagatatcagtccacggtgtggtcaaccacagcgcatcggtcatatcccgccagctatcatcgcacccggcatcgtaggtttttgtagctccgttgcgggtaataaaggaaagtgtcgccgggaacggtactttcgccttaccgtcatcggagctgaagacacaataggagcgcccgccaatcacctgcgcgggtccggtcaccttgatcagcacttcgtcggcagctgttttaccgctggtggttacgatatagccgaaatcgagtgccgactcgccgctgccaacatatccctcccgcgacggtgtctgagtatattcatcggagataatactgatgctgaaatcacggggtttgataatcagcgtgttggaggtagaaaattcataccagccagactccggtgatgtggtgttctgaaagcgaaagttgaatagatctttggtgttgatatcgctgatcccgaggttcaccatctgcttaaagaagttgctcgagaagaaaacatagatcgagtctgcgctcttcatctcgttgaaggtgtagtaataggcggtattgctcaccggtttccatgaactgccattcagactgaactgcatatcgtacgccccgacggccgaggctaacgacgagttggcgatcgccgggaatatatggattgaggtgttgctgagtccgtttgtttgcagggtatagttaaccatcttacaacttaatcctgaacggctgccgatggtttgcgtccggcagtcggcgttcccttcgcccagagtcggtactccgtcgctgttgataaatacttccgccagcgagtgggtatttatcaaccgtagatttgctgctttcgtatgggtgacgttgcgaacataccagttgccggaggcctgatccttacagcgtgcgccgctgctggcgtcatagttcacagaggtctggcaggcattgatggtcattgtaaagctgctgccgacgggcatttgttgcatatactggtaaaacgcgtctgacaacatgccgtgcatccacttcgcgccgccgctggtcaccgtcgcgccataaaatccactggcgtcggtggtttgcggcaggataagactggtggtcatattacacccagcgtaccagttgatgcagcgcaagccagttaaaggagatgaaactggtgaattttccagccacatatcaaacttccagttggtataaaggccggtgttgtaaccgttatcaatgtagccgaggctttgctgatagatggttcctgaaccagtgtattttaaaccggtccagcggttggcaccggtcaggcgcggatccagcgccccgccaggagtgacgaaaaagttgtcgtctgagttgttttcgacaaacacaaactcgcgtgccggtgcatccgcccaggttgttttgctcactgccgctctgagcgcagttactggccagattagcgcgaaaattatcatcgttattagtaggttaactctcattctcttctcctgtctgcgtcaccgccgcccacgatgagaggccgctgcagaccacatcaccgacccagacggcaccgcgcgcctggttgagttccagagccacttcgcaggttttattgccactgtagcgaaaatcgatagtggggtatttcttatccacgtccatgacaaactcgccgttttcatcggttcgggttcggccgatatggttgttaatccgtgcgttagccagcagtgtgccgtcttccgcacggatacgaccggagacggtaaccatctgcttcacctctggctcaatgacagcgacattgcctggatagagagtcagacgacttttgcggccgctgacgatatcgtaactgtcgagtgagtttttgctgttctgtaactccacctcatatcttccatagggagagagcgggagatagttacgcttgccgttaagcgggaaaatccgcccgttgattttggcgctgatctgaccgtcgtcctccagcccggtgttgaatatcaccccagcgttgccatcagtccgcccgctggcagcaatgtttttaccctgccagccgacgctgccattggcggtcaagttggtattgacgtagccgtccgccgcgctattgacgttcagcgttccgctggcgtaacgagcgtcgaattgtgcatacgccccgccgctgagggttttgtcatcaccggtatcgccggagatggcacgtgacagattggcaccaacagtgcgaatggttccttcatcaaactgtttgcgtgctgacaggtttgccatggtgtagccgttttgatgagtcatccctgcgctaaaccagttgcccagtggtagcgagagatcgagagcgatatattttcctgtattggcgttgctgtcgccgttgttatagcgctgaataccggcccgcaggccaagcgaaccaaaggtaccgctgtagacattttgatagtaatctgccgtgtaataatggctgttgtaacggcggtcatcattgtagctgatgctgaatgtgcccagcttcgaccacagtgagttcaggttgagtgtgccgccgattgcacggttgtcggcatcgctacgtcgcaattgattgccaatgcgggttttttcctgattaacccacagcgaactaaagcctcccggtagagtggcgctgatgctgccgatgctgctccatgagctgtcactggccagcatattttgcaggttaacgttgatcgcccccccaagcggcagcgtcagacgggtttcacccaccgcctgattatcgtatccatatcccgttgccgcccagctaagcgtactcaatgagccggaggtcgaggcacctgctagccaactctctttagctggtcgcgtctttttcccgttttccgaccagcgatccatatgaaagctaccgccccatacctgccacgccagtggtgcaccgacgccgcgcccccggctaaacagcttattgacccgctgggtgcgtttgctgatcacgcgaccgttaacgatcacctcaacttccacatcgtaaatcccgtacggtagaccccgggtatccacttcatgattgcccatagtgaagttctgaacgcttagtagccgcccatcacgggtgagatgtacttcgcccgccgccggtaaaaaggcgatcactggcgtggctgactggctgctgtcgaagatggtggagctggcctggtttccccaggaaaggccgtaaatcttccctgctgaaatggcggtcatcggccctaaggactgcaagttccaggtgtcgagcattccaccggcaaatcggtgaccggcaaaatcgcgttcatacatcgctttatataattcactgtcctgttgaccgctaccgatcccgtacagcgagccgtcgagcaccacatgatgttcgcgcagtgcagtaacgttattcagcgacagatagctggatgtgttgctcccgccgttacgcaactggttgttatagacgcccaagttatagctcagattactgctgagggtgttaacactggactgcccgatgtcttcgctacgtgagcgtagtacggtgcccagcgcttcgcgcttgaccactagctgcagcagcagttggcgcaagctgagatccagctgcgcgttgtcagtcagggggatggtaagggcctcattgaacggggcgttggccagagccatcagctgctgtcgagtttgttcgctgacactggcgttatcttcactctcttccagctgtattttccggatgcgtagctgtccatcgtccagccagataaaagcgctgccgattcgctgatcgtcctggcgaccctggctaccggcgagatgaatatagagcgggacgctcatgccgtcctgaagcgcctgactgaaggcctgcggaataatcaccccacctatttgctgcgcacttatgtcagcagcgctggcatcgggctgaacgaacaaaaagaccatgccgaaggcaaactgggctttcagtcctggggagaaccgtcgtaaaggcattgtcgttatccatctgcacagctatctatttcacgggaatgaacttatcaccctgccaaagtgcaacccgtcctttgttatccgcagtgtccacgcgggtaaaacgacgcgacttgcccggcatcaggtagtaattctctttacactccttaccgttggcggctttcaggcaaggtccgtaggcgaggatccgcagcgtcgcatttcctgtatttgtcagggagccgttggcgtactgaaagtggtagttcgcctgacgaggggcgacgaccagaatggtgccgatgcgggcggaagcagtggccacagcgctgcggttggcattatcgcgctgcgcatcactgagggcctgatcaaaccagacaatgcggtagtagcgctctttttcatctgcgggtcccttatagaagaagcggatcacttcgctggcttgggcgggtagcagcaagctggcgggagtgagtagcaactcatccggcttgtccattgagataacctgcccgtcgtcaagcggtgaagagagccgttcgagacggatattgataaggcgaccactgtcggtactgtttttgatcgttttgctcagcgtgctgctgtcactgttcataaacgatgatatatcgccgacatccagcgcctgggccggagatattccggaaaacagcagagcgagaggcagaaggtgctttttcataacaattccgtccaggaataaagcaggggggctacccctgctggtacatcagagagattaactggtccaggtcgcgtcgaactgtacgctaacgtcgccgctccagatgccttccggtagagtgctgtaatctgttactgcggtggtaccattggtggtaccgctgatgatggagaaggtgaaaccatcctgtgcggtggtacgattgctggcattgtaaccgttagccagcgggctaaggttgccgcccagtacgccgttggcggtatcgatcatcacggtatcgccagttttttcgactgccgcgccgttataatccacgcccacattcagtgtggaacctgaggtatccaactgggttaatgtgttggtgataagacgtgaggtcagtttaaaggcggtagccgttgagtcaccctcgatagccacgtcaaatagacctttctgtgagttaaaacctttaatgccttcggcatactggaacgccaggctaccgagtggcgtcacaaccagcttactggtggtgtcttttttggctgttgccgaccaggtcgctacagcctgagctgttacgtcagcagcctgcgccacacccatgccggtaaacaccgttaccagagctattgccagaaccttttttttcattgcatttcttcccgagttgaattgaggacgtgatgtcccagtgagtcattttttaaaactaacttgcctggagtttactgaaccaacttatatatttttgagtacagcttggcctcagcattacgccgatgggtatacactgtcttcacactacaattttcaattctggcaatcgatttaggttgcattccctgggccgtcatgcggataatttccatttcccggtccgtgattttatctttcttaatatcttttctcaggaacctgccattaatcacatagaccagttcttttctaatatcacgactcagtccagcgtataccacgcccctaatattgctattgtaataccaataatttgctaaggcctctgactttctggccgcaatcaatacgacctgtttcccctttaccgcggataaccattcattatcacggtttataaattcagataaagaatccgtactgagattgataaacacgaaatcttttctaattttctccaacgatagataaattaatctgtcgatatccacaatcagttcagatagtcctttatagaagtaggcgtcatggggagaccagatgtatttatcagaacggttttgacattccatatggtttttaacctcatagtccctactgtaatcactttgccatgtcactactttccaaacctgtaatttttacaggtgcattcagtttccttagtaaaccggaagtaaataagatacgtagtacatatcaataaaggttaaacgagattaagtttaattattttcgattgggcttaaatttatgttttttttcccgatgagtgtcaatatgtgaacggaaaaggaattcaatggttaagtcaatatttagaaaaactgaaaatattgcttttttgataagaagaaaaagacatttggtttcataaggttattggcaatataacgttcaattcttacttgcattttatattggtcaggaactttgccctgaagtgttaggaatagtcttaatgcgctgtgtgatggactagtaaaaaaacaagttttaagggtaagggatagaatataaaactatgatgagctgtcattgaagatgatttgccaatcagtaagatattttaatggattaacatgccgcacaaaatggttacaggtgttcattccaataagtaatggaaaattgaacgggcgtatgtacgtcatctgttcggtaagcccccaagagccagattaagtgaagttaaacgaaggctgccagctgtcacaggaacgatggcctttttgtcagggcactgcattcagttatctgtgcgcgttactctaactggcactcgaacgtcggcgacggggttaccggtggatcagactgttcctgtggcgtaaacgtttttatgttagtaccaacagatttaccacatttatcatcttaacagtttgagtgaaaatgcaggctgcgccgcaaagggaggagactgagtggcgtgttcagtctaaaagagggttgatgccagcatacaggggcgaagctggtcaacaagtcaacattaagataatggaatattcggagagaaacgtcaggcagttggcctcaaatgaacaggaagaatatatccccaggaaaattaatgttggtgttataaacacaccaacattaatccgatctgattattaatcagacaaatatcgttaatccgtcgaattttgaatcaacgttttttcttacgaccctgaacggccttaaaacgtggattagatttacaaatcacatatagccgtccttttcgcttcacaatctgacagtctggatggcgttcttttgcggtacgcagagagttaagaactttcatcacgccccctttttcgtgctaacaaaacgaccaaaacgttgggtgaatcgtgcaacatttccttctgatgccactgttctcagcttccctgtatagaacgggtgcgatttagaagagacatcaattgtcacgtatggatacgttacgccatccagctcaatctcacggtctgttttgatagtcgagccgattttaaagtactcatcaacactggtgtcgtggaacaccacagtacgatactcaggatggatattgggcttcatcatttttacctgttatgttataacataaccataaagatacatgctcatccggatcatttcaacactcaatccctgtgactctttgtggatgtggaattttcgcaacggggaactctggcattgttagcagccattggtgacgctcccataaacgcctggatgagtgattgatgatggttttgctgagagtatggatttttcgagaatggaggttatctccactttactggccgataatttatcgcagtatgattgattacctgacagcgtgtattcctctcccacggatataataattacttacaaaaaagggagaggatgcatattttaaatatcactgaagtgaacagtttatttccgttattaatagaaatggagaaataaataggcgtattctacaattgcgacaaaaacaacgatattaatcagtttatgactgatttgctgtactttattctctttcattggtacttcctcgctttaaaaaagagtgcacttcgtaagtgcccttatataaataacgagtttggtcaaccaattttttgacatgtatcacaaatttgaatagatgtattacatcaactatcttttattgcaccaacgtcattgatatatgtcgcctgaagtcagttccgggaatgagtctgatctcaagactggcccagtccgggcgttgattggtgctgaggagcatatcgcatctcatcataatgtcgtatctcctggggtgttatacaagatatcgttgttggtgacctgggagaggaattgagttctattaaaccgtcaactatgccggatacatactggattacactgcaggcacgccttatgagagaacgtgccgcagtgacgggttaattatctgaaagaatttgtgaggctgtatcggttactcattgatttgatagttttactctcgggagaataatagatatttaatccattaacggaaaccagccagttcctttcgatgcctgaatttgatcccatagtttatccggaatggttaattcatgaacaagttgtgttatcgttcatgagaagcataacgtaaagggaaaagctcgattagacggcagaatttgtcaggggttatgaacgaaattcataaatctgtttgagtgttgcgatgggtagtgcaagttcgatatctccgcaatttacagtccgatgaaggaaaatgaatatccataaaaaatatattggtttatcctggcatatatacctatttcgacgtatttccaatagttttaattaaaggcaggtcattgttattcactctgaatagtgaattattcactgtccgcagagtaagaaatataacttaggtatctatttaatgacttgcacaaaaagctaaattttcccccataaataaaaatataatcccgcgcccaaccacctgatgagtggctataggcactggatatattaggtggcggtgcactttcttacataaaggtatttccttttctgcggaaaaggaaatcgggaaatccccggtttttctgacaagcagacgccattatttgtgtctgcctatgttcgttaattcgttcatcaggaaattatctcaatgtcacattataaaacaggtcataaacaaccacgatttcgttattcagttctggcccgctgcgtggcgtgggcaaatatctctgttcaggttctttttccactcgctgtcacctttaccccagtaatggcggcacgtgcgcagcatgcggttcagccacggttgagcatgggaaatactacggtaactgctgataataacgtggagaaaaatgtcgcgtcgtttgccgcaaatgccgggacatttttaagcagtcagccagatagcgatgcgacacgtaactttattaccggaatggccacagctaaagctaaccaggaaatacaggagtggctcgggaaatatggtactgcgcgcgtcaaactgaatgtcgataaagatttctcgctgaaggattcttcgctggaaatgctttatccgatttatgatacgccgacaaatatgttgttcactcagggggcaatacatcgtacagacgatcgtactcagtcaaatattggttttggctggcgtcatttttcaggaaatgactggatggcgggggtgaatacttttatcgatcatgatttatcccgtagtcatacccgcattggtgttggtgcggaatactggcgcgattatctgaaactgagcgccaatggttatattcgggcttctggctggaaaaaatcgccggatattgaggattatcaggaacgcccggcgaatggctgggatattcgtgctgagggctatttacccgcctggccgcagcttggcgcaagcctgatgtatgaacagtattatggcgatgaagtcgggctgtttggtaaagataagcgccagaaagacccgcatgctatttctgccgaggtgacctatacgccagtgcctcttacccagcaatagtggacacgcggctaagtgagtaaactctcagtcagaggtgactcacatgacaaaaacagtatcaaccagtaaaaaaccccgtaaacagcattcgcctgaatttcgcagtgaagccctgaagcttgctgaacgcatcggtgttactgccgcagcccgtgaactcagcctgtatgaatcacaactctacaactggcgcagtaaacagcaaaatcagcagacgtcttctgaacgtgaactggagatgtctaccgagattgcacgtctcaaacgccagctggcagaacgggatgaagagctggctatcctccaaaaggccgcgacatacttcgcgaagcgcctgaaatgaagtatgtctttattgaaaaacatcaggctgagttcagcatcaaagcaatgtgccgcgtgctccgggtggcccgcagcggctggtatacgtggtgtcagcggcggacaaggataagcacgcgtcagcagttccgccaacactgcgacagcgttgtcctcgcggcttttacccggtcaaaacagcgttacggtgccccacgcctgacggatgaactgcgtgctcagggttacccctttaacgtaaaaaccgtggcggcaagcctgcgccgtcagggactgagggcaaaggcctcccggaagttcagcccggtcagctaccgcgcacacggcctgcctgtgtcagaaaatctgttggagcaggatttttacgccagtggcccgaaccagaagtgggcaggagacatcacgtacttacgtacagatgaaggctggctgtatctggcagtggtcattgacctgtggtcacgtgccgttattggctggtcaatgtcgccacgcatgacggcgcaactggcctgcgatgccctgcagatggcgctgtggcggcgtaagaggccccggaacgttatcgttcacacggaccgtggaggccagtactgttcagcagattatcaggcgcaactgaagcggcataatctgcgtggaagtatgagcgcaaaaggttgctgctacgataatgcctgcgtggaaagcttctttcattcgctgaaagtggaatgtatccatggagaacactttatcagccgggaaataatgcgggcaacggtgtttaattatatcgaatgtgattacaatcggtggcggcggcacagttggtgtggcggcctcagtccggaacaatttgaaaacaagaacctcgcttaggcctgtgtccatattacgtgggtaggatcataaagtcctcgggtcgttgtccactcttttggcatgtcagcatattcacataccgtaccagcaaaagtttcaaccgtgagcaaatcgaccgattttgttgacggttcaaacgtggaaacgaaatagatatccgtcttaaaattcttcatacatctggctaaatgatgacgtcgtagtttgacttcttcatccggtgatttattcgacacttcaatgtcatatttaaatgagttgccaaaaataggtgtctcaggaaagttgattaatctacactccgtcttttgctgttgacgtattaaaaaagaagggaagatatttgcgagatcccaataatcacggtggcggtattcacggggagagcagccgaataactttttaaattcgcggctgaatgactgctgtgaatcaaaatgcaaagagagtgcaatatcaagcatagatttcgcggtgagccggacaagaatggcggcacgacaaagccttcgtttgcgaatgtattctcccaaaggcacatgcatgaaatttcggaacagaagctggatgttgcgtctgctgtagccagatttctgtgcgatatcttcgattgaaatagggtgctcaagattgcactcaatccactccaggagctgctgtagaatcttctgcctgatcatctcattctccgttaattctttgtcatatcgcacattttcgttataccctgggccctaagtgtatcaaaaatagcaagggcgaaggcaaaagcactggtagcgtctgcttcgttgtccccgaaaatagagaggtttcagtcctacattattaatgaattttttgcataagtgatatcaaaatccacatactactttgaggttacgttttaacgtagactcattgttcatgcctaatggagggactgacagtggaattttccgtatagtctgcttcagagtattgcagatgcccatcaaaaatcgatttctcactgacagataaagaaatggcacaaattagttcgcttgatttgggttatgttggggagtcggtaaaacattttaatcctgaatttgttcgtggttgtcttgctgtaaaaatacatgattgatattaatcatgtattttacctaagacgacaaaaaccttttaacagggagtgatattgatcttcactctgtcatatctccggtaatatggcgtcaggcttcatcatcagaaagggggcctgacgcctgaaaaagtgaacaacagacagtgttcggattatcaatattcagtttttaacgttgaactggattcattactgcgttgtttaagaatttcccgcgccgaatctgccattatcatgactgcacctgccagcatcagagtatctttcaataccaggcgaccagcaccggataaataagggaaaccatgatgagcgtcacccaatgcgggtacccatgcctccggggtggtgattaaaaatgagagtgttaccagcggcgtggtaaatgccatcagtcctcccaataaacctaaccagcgattgacaggattagccaaaaccagcagagcaataatcacctccacgacgccaagaccgttggaaaaaccataggtattattggccgtttgccatgcccttgcttctggtttgtattcgccttcgtgagtcagatactgtttatagtcttccgggtgttcataaaagaacgacattagtggactgtttgcgacgaatggtgtaatgctgtctgcctcgtaagggacaaactttaataacccaatccacataaaaacaattgcaatactcagacgaatcaatgtcaggccaattttatctccccgacttaacaggtgcaggtatttttccattgtgaacatccttatttatacaatactgctgttgcggttgaattattatcaattcgcatcgatgtgactttccaggatgaagcattatattttctggctatatcagcaatggtatcctccagaactgtcggtgatgctgatactgacgagacgctgatatgtttcagaattattttatcatctgcattggtggaaaatgccataacgccagataatagtgttgcaaataaaacagattttttaaacatataaaataccatcaatgaagtgattaagaagttatagagtaacagagaattaataagattcttttctctgagacgccagaatatttgttctggcgtctgattttgagtttatttgactaatgaaaatagatcattgagtgattcgctcatcgacggatgagtaaatatctgatcgcgtaatatgctataaggcagcccggcatccatcaccattttcactatattgatcatctcgtgggagtcaacacacagcagtgatgcccctaacatacgttgggttttattatcaacaatcgcttttaataccccacgagtatcattcatcactctggcacgcggaattgcagctacaggcaatgtcaccacctgaatatcagcaccactctctctggcttgttcttctgtcataccaaccctggacaggggcggtgtcataaatacggaataaggcacatttttccgatcatcagtactacgtttgccttcacccagtaactcatcacgtacaatgcggtaatcatccagtgatatgtaagtaaattgcagcccgccggtaacatctcccatcgcccaaatattgtctgcggtggtatgtaatcgcttgtcaacgacaattgccccgcgctcgtttactgcgataccggcattttctggatgtaacgaagcggtagccggttgacgaccggaagctattaacagtgcatccaccgccagttgggcgtgctcgctatgcacttgcacttgattttcatggtgactgattcgctccacatgggcattgaggataatatcgacgccctgatcgcgtaaaatcgtcgcgatattatcagcaatatcccgatcttcccgaggcaaaaacagcgaagctgcttctaaaatggttaccttgctgccaaaattagcgaacatagaggcgaactcaacgccaatatatccgccgcccaaaatacctaaatgcccaggcaattcttttagattaagtaatccggtgctgtcatatactcctggcgtggtggtaattccaggaattggcggaaccacggtttgtgcaccggtattaataaaaattttctcgccatgaatttccagatttccctcaggccgatgaacacgcaggctatgattattgataaactccgcctggccgtcgatcacgtcgatattgggcatatccgcaagattatgaaaattcttattacgtaaaaaattaaccacttcatttttacgctgtatggcacggacaaaatctgtgtgctgctgtgcgtcatgaaccaatgttttggttgggatgcagccgatattaatacaggtcccgccatacattgcatttgattgttcgatgagagccactcgccaacctgcttttgccagcgtgacggctaatgtttttccagccttgccaaaaccaataatcactgcctgatatttattcatgatgatttcctgtcgaaacgcgttcatttgacatcatgactatagacgcaaaagagcaaataacatttcttcacaacgcttgatattttgtcttatcgtctgatattttctttttcttaatcagaatcacaaaacaaaaatcatgattaactatttgatggtattagattagttatttactaagattgttggtgtttgtaatcaaaaaccactcaggagtctgatatggatgcccttagccgtttgttgatgcttaacgctccacaaggaacgatcgataagaattgcgtgttaggaagtgactggcagcttccacatggtgccggggaattatcggttattcgttggcatgcgttaacgcaaggagcggcgaagctggaaatgccgacgggggagatttttacattacgcccgggaaatgtggtcctgctaccacaaaattcagctcatcgcctgagtcatgtcgataatgaatcgacctgtattgtctgcggcactcttcggttgcaacattcggcgcgttattttttaacgtctttgccggaaacgctgtttttagcaccggttaaccacagcgtggaatataactggctgagggaggcgatcccgtttttacaacaggaatccagatcggcaatgccgggagtggatgcactgtgtagccagatctgcgctacattctttaccctcgcggtgcgtgagtggattgcacaggttaatactgagaaaaacattctcagtttgcttctgcatccacgtcttggtgcggtaatacagcaaatgctggaaatgccaggacacgcctggaccgtcgaatcgctggccagcatcgctcacatgtcccgggcaagttttgcccagcttttccgtgatgtttccggaaccacgccgctggctgtattaacaaagttgcgtctacaaatagcggcccagatgttttcccgggaaacgctccctgttgtggtgatcgctgagtcagtaggctatgccagtgaatcatcttttcacaaggcgtttgtccgcgagtttggttgtaccccgggagaatatcgggaaagggtcagacagcttgcaccctgaataaaaccgccagaaatcagggcaaagataatccgcattccgggagttgtgagcctttcaactatttctatttccaacggtggtttgggctttatatattttttctgatggactctagctcagtttttaaataaaaatgcaaactaaattgcttcaattaaataaaatcccgactattacttgatacgtgattattgtcggtgatttttttgtacaccatcagtgtatatctcaataacccctgaataagtagctctgaataggtataagggatgtagccatttttaaatggatttcttatgccaaaaatgatcgtcgatttccccataaaatgtgagcgatgccgaaagaaataaaattagttattgcatttgacgtttggatgaaagattatcatttgtcatacaaatgaggggtggtatgttgctagccaattaaaaaagaacgccatatttattgatgattgatcccccggtgggggggaaacatcgggcataaatgggcatgaagtaatggagtattagttgtgaatgtcaatttctttgtcacctgtattggtgacgccctgaaatcaagaatggcacgagactccgtgctgctactggaaaaactcggctgtcgcgtaaatttcccggagaaacagggatgctgcggtcagcctgcgatcaatagcggttatatcaaagaagcgattccagggatgaaaaatctgatcgccgcactggaggataacgacgatcccattatttcaccggctggctcttgcacctatgccgtaaaaagttacccgacgtatctggcggatgaacctgaatgggcatcacgtgccgcaaaggttgccgcgcgtatgcaggatctcacctcttttattgttaataaattaggggtagtcgatgtaggtgccagtttgcaagggagagcggtgtatcacccatcttgtagcctggcccgtaagctgggagtgaaggacgagccacttacgctgctgaaaaatgtgcgtggactggagctgttgacctttgctgaacaggatacctgctgcggatttggcggcacgttctcggtcaaaatggccgaaatatccggcgagatggtgaaagaaaaggttgcgcacctgatggaagtccgccctgagtatttaattggtgctgacgtgagttgcctgctaaacatcagtgggcgattacaacgggaagggcagaaagtcaaagtgatgcatattgctgaagtgttgatgagccgctgaggatataaagatgtcgatcaaaaccagtaatacagattttaagacacgcatccgtcagcaaattgaagatccgatcatgcgcaaagcggtggcaaacgcgcagcagcgtattggggcaaatcggcaaaaaatggtcgatgaattggggcactgggaggagtggcgcgatcgggccgcccagatacgtgatcatgttctgagtaatctcgacgcttatctgtaccagctctcagaaaaagtgacgcaaaacggcggtcacgtctattttgcaagaaccaaagaagacgctacccgctacattttacaggttgcccaacgcaaaaatgcccggaaggtggtgaaatctaaatcgatggtgaccgaagagattggtgtcaatcatgtgttgcaggatgctggcattcaggtgattgaaaccgatctgggtgaatatattctccagctggatcaagatccgccatctcatgttgtggtcccggcaattcataaagatcgccatcagatccgtcgagtgctacacgaacgtctgggctatgaggggccggaaacgcctgaagcgatgaccttattcatccggcaaaaaatccgcgaagatttcctcagtgctgaaataggtattaccggctgtaatttcgcggtggcagagaccggttcggtatgcctggtgaccaatgaaggtaatgcgcgaatgtgtaccacgctgcctaaaacgcatattgcagtgatgggaatggagcgtattgcccccacgtttgccgaggtagatgtattgatcaccatgctggcgcgcagtgccgttggtgcacgtttgacgggatacaacacctggctgacaggaccgcgcgaagctgggcacgttgatggtcctgaagagtttcatctggttattgtcgataacgggcgttctgaggtgctggcctctgaatttcgggatgtgctgcgctgtattcgctgcggggcttgtatgaatacttgtccggcatatcgccatattggcggtcatggatatggctctatttatccagggccaattggtgcggtgatttctccgctacttggcggctataaagattttaaagatttaccctacgcctgctctttatgcacagcttgtgacaacgtgtgtccggtgcgtattccgctgtcaaaactgattttgcgtcatcgtcgggtgatggctgaaaaagggatcaccgcaaaagcagagcaacgggcgataaaaatgttcgcttatgccaatagtcatccaggattgtggaaagtcgggatgatggccggtgctcatgcggcaagctggtttatcaatggcggcaaaacaccactcaaatttggcgcgattagcgactggatggaagcacgcgatcttcctgaagctgacggagagagtttccgtagttggtttaagaaacatcaggcgcaggagaaaaagaatggataatcgaggcgaatttttgaataacgttgctcaggcactgggtcgcccgctgcgacttgaaccgcaagcagaagatgcgccgcttaacaactatgctaacgagcggcttacccaacttaaccaacagcagcgctgtgacgcgtttattcagtttgccagcgatgttatgttgacgcgctgtgagctgaccagcgaggcgaaggcggcagaagctgcaatacgtctgtgtaaagagctgggagatcagtcggtcgtgattagcggtgacacgaggctggaggaattggggattagcgaacgtttgcagcaggaatgcaatgccgttgtttgggatccggcgaaaggtgccgagaatatctcgcaggcagagcaggctaaagtgggtgttgtgtatgctgaatatggtttaaccgaatcgggaggcgtggttcttttttccgccgccgagcgcgggcgttcattgagcctgctcccggaatattctctttttatcctgcgtaaaagcactatcctgccgcgtgtagcgcaactcgcagaaaaattgcatcagaaagcgcaggccggtgaacgaatgccttcctgcattaacatcattagcggccccagttcaacggcggatattgagcttatcaaagtcgtcggagttcatggcccggtgaaagcggtgtatctgattattgaggattgttgagagagatatgaagtctggacataaacctgaagaaggcatacgaggttgaaaatagcgtttaggacaacctgacttaaccccgttccgtcatggttatgctgctcttctgtaaatatcctggtattaccaatgccaggatatttacagtgaaaaagacaggcatccattcctgaaaacgggttcccttcccggtcattgtcacttcagctttatacaggcactctctatcagaatgttgtttattactgcccagagttttgttggtattcatctaccatttttttgacaaggcaaaacattacagaaattacaatgcttagaaaaaatcccagagccaggcaaatggcagcagggtatttattttttatttctggtgagcttatagttacacagccatcaccgttcggatacaatgaccagttcctggtcaggtatatcatttttgtataaagctcactgttaattgctgaaggcgtttgtatctcatcgagaacttgcctgccattatgatattctgacgcataccatttgataatagaggcctgcacgcgagatatttcctcttcagcagttggtaaagctctcttatctcctgaccattccagccttatttctctgttcttgacatctgggctggtgtgaaaaaatgtagtaattcgctgaataacatcttcagtcattgtagtctgacaggcaaaattattattgctatcacagctaacaagtatacctggcgttgtctggtttatttttaggctgtaaatcacttttatattgtctttattgatatacagaaacaacagcaccatagccatacatatagccataataaaaaggataacacgaatctttttcttcagataaaataaaatctcaatcagatcgatatcctgtttgatttgttcacgcataatatatccagagaataaaatctgtcgcagataaggttgtattaatagtctgtatcaggaatgttcgggttaaatatcagcaaaaagcccgcatcatgaatactggatatgaagcatgagagttacctcagtgtttatataaggattcggtccccctctctggaacggtaactctcaatctgatcggttcctgcgttagttcacatcacgactcattttttcgctctcaccggcatcccatttgccacaaaatatcccgccgtgctcctcggcagcgcttcctgtccacgaatcatatccgctattttctcgccaatcataattgtcgtggcgttcaaattcccggtgataatctgcggcataatcgacgcatccaccacacgcaggccttctaacccgtgtacgcggccttcgccgtcaaccacggacatctcgtcgtaacccattttgcaggtaccgcacggatggaaggcggtttcggcgtggttacgcacgaactcatcgagctgttcatccgtctggcattcgacaccggggctgatttcgcggccacgatactgatccagcgcgggttgatgcatgatctcgcgggtgatgcgaattgcgtcgcggaactcctgccagtcctgctcgtgcgacatgtagttaaacagaatcgccggatgctggtgcgggtcgcgggatttaatccgcacatgcccacggcttggcgagcgcattgagccgacgtggcactggaaaccgtgctctttcactgcattcgagccgttatagttaatcgctactggcaggaaatggtactgaatattcggccacgcaaattcctcacggctgcgaataaatccacctgcttcaaagtggttgctggcaccaacgccagtgccgccaaacagccactccgcaccgattttcggctggttccaccactgcagggcagggtagagggaaaccggttctttgcactcatattgcagatacatctccagatgatcctgaagattttcgccgacgccgggtaattcatgcaccagcggaatatcaaactccgccagcagttcagcgttgccgacgccggagcgttgcaggatctgcggtgaggcaatcgcgcctgcacataacagcacttctttgttggccgttgcgcgggttgggatggtgctgtcgccttccagccattcgacgcccaccgcgcgtttgccgtcaaaaatgatgtgatcggtcatagcgtgagtacgaatggtcaggttaggacgcgatttggcctgatcgagatagccacgcgcggtgctggcgcgacggccctgcggcgtgacggtgcgatccatcggaccaaaaccttcctgctgataaccgttgagatcgtccgtgcgcgggtagcccgcctgcacgcccgcttcaatcatcgcttcaaacagcggattgacgccgggtttggaggtagtgacgctcaccgggccatcaccgccgtgatagtcgttttcacccatatcgcgagtctcggccttgcggtagtagggcaggcagtcgaggtagctccagttctccagaccgggttcttgcgcccagttatcgagatccagcgcattgccacggatgtagcacatgccgttgatcagcgacgatccacccagacctttaccgcgtccgcactccatgcggcggttattcataaacggttcaggttccgtttcataggcccagttgtagcgtttaccctgtagcgggaatgccagggcagcgggcatctgggtgcggaagtcaaagcgatagtccgggccgcccgcttcaagcagcagcacggaggtattcggatcttcagtcagacgggtagcgagaacgttgccggctgagccggcaccaataatgatgtagtcaaattgcaaataaacctcctggttagaatatggactggaatttagccatctcaacctggatggacttcacctgggtgtaactctggagcgtcatcacgccgttctcgcgaccaatgccggagtgtttgtagccgccaacgggcatctctgccggggattcgccccaggtgttgatccagcaaatacccgcttccagctgatgaatgacgcgatgcgcgcggttcaggtccgctgtcacgatgcccgccgccaggccgtagtcggtatcgttagcgcggcgaatgacttcgtcttccgactcgtaggtcagaatggacatcactggcccgaagatctcttcacgcacgatggtcatatcgtcgctgcaatcggtgaacactgtcggtgcaacccatgcgccgttatcgaagccatcgcctttcagtacatcgccgccgcacagtacgcgcgcgccttcctctttgcctttggcgatatagcgcagcacgttatcgcgatgcgggaagctgaccagcgggccgaagttagtttgcggatcgaaaacgtcgcccgcgcgaatgcgctcaacgcgcgccagaattttctgctcaaatgcggctttgcatttcgccggaacgaagacgcgggtgccattggtacacacctgaccggagctgaagaagtttgccatcatggcgatatcggcggcgagatcgagatccgcatcatcgaaaacgatcagcggtgatttaccgcccagttccatggtcacttctttcagggaagaggccgccgagttagccatcacttttttgccgctggcgacaccgccggtaaatgacactttggcaatgcccggatgctcggtcagatattgcccggtctccgcgcccacgcccggcaacacgttaaatacgccgtccggcaggcccgcttcgctgtaaatttcagccagctttaacgcggtaagcggggtaacttcgctcggtttgaaaatcattgcgttgcctgccgccagcgccggggcggatttccacagggcaatctggatcgggtagttccatgcgccaatccctgccactacgcccagcggttcgcggcgggtatacacaaaggacgtttcacgcaacgggatctggctgccttccagcgccgggatcagcccggcgtagtactccagcacgtccgcaccggtaacgatatcgacggttgaggtttccgaatatgcttttccggtgtcgagggtttccagttttgcgagttcgtcattgcgttcacgcagaatatcaacggcccgacgcagaatacgcgagcgctccatggcggtcatcgacgcccagattttttgcccctgctgggcgcttttcacggcgcgatcgacatcctcgcgcccggcggcctgcacggtcgccagcacgttaccgttggccgggttaatggtctcgaaggtgcgaccgctggtggcggaggtataaccaccatgtatataaagctgctgttctgccattcgggacatcacgtctcctcggttaatcggtgggtagatgctgagtgataaagtggcgggtcagggaattagcgcgggttttatccagcggtttgccgctcagagccgcgcgcagccataatccatcaatcagcgcggccaggccgtagcccgcttcctgtgcctgttcgcgcggcaattcgcgacgaaactcgctcaccagattcgacagcaagcggcggctgctgacctgctgtaaacgatagagcatcggctgatgcatactgctggcccagaacgccagccaggctttcatcgccgcactgctcacctgcgtttcatcgaagtttccgccaacaatcgcctgtaatcgctgctctgcactgccctgcggaagtgcatgtaatcgattcaaaaccgcgtcacgcagctgactggtgatatcgcgcatggttgcttccagcagaccatttttgtccctgaaatagtggctgatgatccccgtagaaacgcctgcacggcgggcgatctgcgcgatcgttgcatcgtgcatgcccacttcatttattgcttccagtgtggcgtcgatcagttgtctgcgccggatcgactgcatccccaatttgggcattttcgccactccattcatcagcggtgtttatctattaaagcggttattgattggacgttcaatataaaatgtgtcttaattgttacgaatttgattttaaatagtaacaataacagtggggatactggatgacagacctttcacacagcagggaaaaggacaaaatcaatccggtggtgttttacacctccgccggactgattttgttgttttccctgacaacgatcctgtttcgcgacttctcggccctgtggattggccgcacgctggactgggtttctaaaaccttcggttggtactatctgctggcggcaacgctctatattgtctttgtggtctgtatcgcttgttcgcgttttggttcggtgaagctcgggccagaacaatccaaaccggaattcagcctgctgagttgggcggcgatgctgtttgctgccgggatcggtatcgacctgatgttcttctccgtagccgaaccggtaacgcagtatatgcagccgccggaaggcgcgggacagacgattgaggccgcgcgtcaggcgatggtctggacgctgtttcactacggcttaaccggctggtcgatgtatgcgctgatgggcatggcgctcggatactttagctatcgttataatttgccgctcaccatccgctcggcgctgtacccgatcttcggtaaacggattaacgggccgataggtcactcagtggatattgcagcggtgatcggcactatcttcggtattgccactacgctcggtatcggtgtggtgcagcttaactatggcttgagcgtactgtttgatattcccgattcgatggcggcgaaagcggcactgatcgccttgtcggtgataatcgccacgatctctgtcacctccggtgtcgataagggcattcgcgtgttatcggagcttaatgtcgcgctggcgctgggattgatcctgttcgtattgtttatgggcgacacttcgttcctgcttaatgcactggtgctgaatgttggcgactatgtgaatcgctttatgggcatgacgctcaacagttttgccttcgaccgtccggttgagtggatgaataactggacgctcttcttctgggcatggtgggtggcatggtcgccgtttgtcggcttgttcctggcgcgtatctcgcgtgggcgtaccattcgccagttcgtgctgggcacgttgattattccgtttaccttcacgctgttatggctctcggtgttcggcaatagcgcgctgtatgaaatcatccacggcggcgcggcatttgccgaggaagcgatggtccatccggagcgcggcttctacagcctgctggcgcagtatccggcgtttacctttagcgcctccgtcgccaccattactggcctgctgttttatgtgacctcggcggactccggggcgctggtgctggggaatttcacctcgcagcttaaagatatcaacagcgacgcccccggctggctgcgcgtcttctggtcggtggcgattggcctgctgacgctcggcatgctgatgactaacgggatatccgcgctgcaaaacaccacggtgattatggggctgccgttcagctttgtgatcttcttcgtgatggcggggttgtataaatctctgaaggtagaagattaccgccgtgaaagtgccaaccgcgataccgcaccgcgaccgctggggcttcaggatcgcctgagctggaaaaaacgtctctcgcgcctgatgaattatccgggcacgcgttacactaaacagatgatggagacggtctgttacccggcaatggaagaagtggcgcaggagttgcggttgcgcggcgcgtacgtggagctaaaaagcctgccaccggaagagggacagcagttgggtcatctggatttgttggtgcatatgggcgaagagcaaaactttgtctatcagatttggccgcagcaatattcggtgccgggctttacctaccgcgcacgcagcggtaaatcgacctactaccggctggaaaccttcctgttagaaggcagccagggcaacgacctgatggactacagcaaagagcaggtgatcaccgatattcttgaccagtacgagcggcaccttaactttattcatctccatcgtgaagcgccgggccatagcgtgatgttcccggacgcgtgattgttattgcataaaaccgcgccatgtctgcatatggcgctgtttctcctacctcttgatacgttatatctatacggttaagcccttagtatctattgatgattaccagacaacagataataaaaaagaaaagaactattgcagcccaaaacctacatttgggctgttgcgaatgttcaataagtttagtcttatttaatgtaaatattgctgatcatttgaaatgacgcattattcatgagaaatgtgtatcgtaaatcaactgaaattaacgcaaccatttgttatttaaggtttaattatctgtgtgtgatattttattgaatgttttaaatattgtttttattggcattgctataatattggttatcatttgctgaatggattcagtcttaatgagtgggtttttaagggacaggcatagagtaatgatacgtatgcataaccaacatctttactcattatgtcattgaatgttgacgctatgtgtttatgagggagaggtattttcagttgatctggattgttaaattcatataatgcgcctttgctcatgaatggatgccagtatgtagtgggaaattataaatattgaaatagtccaactacttctttattaccaaaaatgagtatctgaattttaatattgcattcttgcgtgattatctcctgagtttgacttgtgattacctttttaaggtatttagcgtaactgtttttgagcgagcatcagaggtaaagataatcttcttgatagtgatgtgggatgttatacgtatggcatcgctgatgtttatggttaccccttatgtgtgctcaggaatcgacaggtaatcactcatactgaacagcgataaaagataaaggtgtgttcatgaattcatgtgattttcgtgtttttctgcaagagttcggtacaacggttcatttgtcattgcctggtagcgtatccgagaaagaacgactgctactcaagctgctgatgcagggaatgtctgtaacagaaatatcacagtacagaaatcgcagtgcaaagacaatttcacatcaaaagaaacagctctttgagaaactggggattcagagcgatattactttctggcgcgatattttctttcagtacaatccggagatcatatccgccacggggagtaatagtcacagatatattaatgataatcactatcaccatatcgtcacgcctgaagccatcagtctggcgttggaaaaccacgaattcaaaccgtggatccaaccggttttctgcgcgcagactggcgtactgacgggctgtgaggtgcttgtccgctgggaacatccacaaacgggaattatcccaccggatcagtttattcctctggcggagtcatccggtcttattgtcataatgacccgccaactgatgaaacagactgcggatattctgatgccggtaaaacatttgctgccggacaatttccatattggcatcaacgtctcggcgggttgttttttggcagcgggatttgaaaaagagtgtctgaacctggttaataaattaggtaacgataaaatcaagctggttctcgagctaacggaacgtaaccctattccggtaacgccagaagccagagcgatatttgacagccttcatcagcacaacattacctttgcgctggatgactttggtacgggttatgcgacctatcgttacttgcaggcgttcccggtcgattttattaagatcgataagtcatttgtgcaaatggcgagtgtcgacgaaatctccggtcatattgtggacaatattgtcgaactagcgcgtaagcctggtctgagtatcgtggcggaaggggtagaaacccaggagcaggcggatttaatgatcggtaaaggcgttcactttttgcagggctatttgtactctccgccagtaccgggtaataaatttatctctgaatgggtaatgaaagcaggtggttgatgtaaaccgctattcacagcgcatcgggaggttggcagcgattaattctcccgatgcagtaaatcctgatagatccccgttaatatgccatttggcgcaaattgttttttaatccactgcgtcacctgacccgtagcagaatgctgagtcgccagtaacatgcgcgaatcctggcgcggattatggatttgtcgggtaaccagcagggattgcgtcatcgcctcacggaccatgtaatccggcaaaaaaccaattccttcacctaaaatctggcactgacatttggtgttgaaatctggcaccagaattgactcctgcccgtgcagcaaccagcccacttttttattaatcgtatgcgcggtgtcctccaccataatattagggtagagacgcagttggctttcggcgatgggttccggcacaaaggctaacgggtgatccggggcgatagcaaaagcccagcgaatcgcgccaatttcagtgtaatcaataccgccgccgtccagtagtgtatcgggtgcgccgatggcgatattggcctgattattaataatcgcatcccagacgccgttatacacttcggtggtgacggtaatctggcaggtaggaaactgctttttcagcacctgtaacaagcgtgcggtgtgtttgggcgtataaagcagctgattaatacaaatgcgcacacgcgcttctatgccctgcgaaatagtatcgattctgcgtttgatggcataaaaatcattcagcaggtcggtagctttgcggaaaaaataacgcccggactccgttaactcaatgctgcgggtactgcgagtgaacagcaccacatccagccccgtctccatacgcttaatggtgtagctaatggcggaagtggttaaacccaactcttctgcggctttactgaagctgccaaaacgcgcagcggtagtaaatgccaacagattctcttcggtaaaaattgagttcattaaaccattctcgccattatctactatgaatttctccagctatgactgtagaggtatcggttaaagatagataatcatttttgaataacttttaatacccgtcgcgtttagtcgtcgcttcgcttaatttttgtccaccatattctgaaattacccccacgcagttacccgccagaaaacccagtaacgtcaccgtccagttcatcccgctggcaaaaaacagcgtcatgccgagaaagccaccgggaataaaggacagtaaccagaaacgcccttgccagaccactaccgccgagaagggtacggtagtaattacgctcgcccagaacgcggacagtccacttacagaggccagccaaccagcagtcagcgcggcgaaaaacgcccacaccatcccggaataattaaccgccagacttctgataaaccccgatttaccgccgcctgcggcataaaaactgcaaaaggcgacgaagccaatggttcctaataattcccatccttgagagagcccgacatgtgaagacactaactgccaaagccctgcacaaataccgacggtgacacccgttgccgtgagtccgttcatcttgttcccctctggttagacatggacgaaagctactcttacatgtgcagactatagagaaataaaacctgattgagtgaaagggtatcgggtcaaagaaacaaatattgcactaccgcacactgcgaaaagattgttgaatattattcaacaaaaaggcgagatacggcgaattaaatttaagcgggttcttttatcagattatcgttgctattctcaattcatcgaaaacagccacaaaaaccaggggaatgtgaatgagtataaaaaatctacctgccgactatttattggctgcacaacagggtgatatcgataaagtaaaaacctgccttgcgctgggtgtcgatattaatacctgcgatcgtcaggggaaaacggcaattacgctggcaagtttatatcagcaatatgcttgcgttcaggcattaattgatgccggagcggatattaataagcaagatcatacctgtttaaatccttttttaattagctgtctgaacgatgatttaacgctactacgaattattttaccggctaaacccgatcttaattgcgtaacccgttttggcggtgtcggcctgacgcctgcctgtgaaaaaggccatttaagtattgtaaaagagcttttggcgcatacggagattaacgttaaccagaccaaccatgtaggctggacgccgctactggaagcgattgtgcttaatgatggtggtattaaacagcaggcgattgtgcagttattgctggaacacggtgccagcccgcatctgaccgataaatatggcaaaacgccactggaactggcgcgggaacggggctttgaagagattgcgcagttactgattgccgcaggtgcataaaccgggaggcttgctatcaacacaccagaaagacggtgtgtgtgggcgctaactgcggatgcggattttctggcgcagcgggggcaaggacaggttgaacaggtctttgccagagcggtaaatatcgcactcccggctcgccagcagttgctgacgctgctttgtgaagagtacgacaatgcgccaaacagttgtcggttggcactcactcactttgatgatctgttccggcatggtgataaggttcagtttgacgatcaaggtattacggttggtcaacatcttcatatagagatgagtcgttgtcggcgttggctgtccccaaccttgcaaatgaccgctgtgaattttcaccttatcgcctggctacagtggcacgacattattcatcagcacctgggggaaaatgaaaccctgtttaattatcgcggcgataatccgttttatcaggcgttaaataaagaattacatattaaacgacgggcagttattcaggccgtaaacgataaacaaaatatcgcctcagcggtcgccagtatgatggggttagggattggccttacgccatcagccgacgattatttaacaggtctggcgcttattttatttattcccgggcatccggcggaaaaatacaaagaggaattttatctcggtctgcaacgcggcaaaaataataccacattattaagtgccataacgctggaagccgcattacaacaacgctgccgggaaaatattcatcgttttattcacaacattatttatgacatccctgggaacgcaactcaggcaatagaaaaaattaaacatattggctccagttccggctgcgacatgctgtatggcatggccgatggttgtgcgctgagccaaacctacggagggaattatgtcagttaaaatagtcattaaaccgaatacctattttgattctgtctcgctgatgtctatctccacgcgtgcaaataaactcgacggcgtcgagcaggcatttgtggcgatggcgaccgaaatgaataaaggcgtgctgaagaatttaggactgctgacgccggagctggagcaggcgaaaaacggcgacctgatgattgtcatcaatggtaaatcgggtgcggacaacgagcagttactggtggagattgaagaactgttcaacaccaaagcgcaaagcggctcgcacgaggcgcgttacgccactattggcagcgccaaaaagcatatcccggaaagtaacctggcggtgatttcggtcaacggtctgtttgccgctcgcgaagcgcgtcaggcgctgcaaaacgatctcaacgtgatgctgttttccgataacgtctcagttgaagatgaactggcgctcaagcaactggcccacgaaaaagggctgctgatgatggggccagactgtggcacggcgattatcaacggcgcggcgctctgttttggtaacgccgtgcgtcgcggcaacatcggtattgttggcgcatccggcaccggcagtcaggagttgagcgtccgcattcatgaatttggcggcggcgtttcgcaactgattggcaccggcgggcgcgacctgagcgagaaaatcggcggcctgatgatgctcgacgccatcgggatgctggaaaacgatccgcaaactgaaatcattgcgcttatctccaaaccgcctgcgcctgcggtggcccgcaaagtgctggaacgtgcgcgcgcctgccgcaagccggtggtcgtctgcttcctcgatcgtggcgaaacgccagtggatgagcaggggctacagtttgcccgcggcaccaaagaggcagcgctaaaagcggtgatgctctccggcgtgaaacaggaaaatctcgacctgcatacgcttaaccagccgttgattgcggatgtgcgtgcgcgtctgcaaccgcagcagaaatacattcgtggcctgttctgcggcggcacgctgtgcgacgaaaccatgttcgcggtgatggaaaaacatggcgatgtctacagcaacattcagcccgatccggaattccgcctgaaagatatcaaccgcagcatcaaacacaccttcctcgactttggcgatgacgacttcaccaatggcaagccgcacccgatgattgaccccaccaaccgcatcagtcgcttgatcgaagaggcgcgcgatccagaagtggcggtgatcgtgatggattttgtgctcggatttggatcgcatgaagatccggtcggctccaccatcgagacgatcaaagaagcgaaagcgatcgccgctgccgaaggacgcgagttgatcattctcgcctatgtgctgggtaccgatcttgatacgccatcgttagaacaacaaagccagatgctgcttgatgccggagtgattctggcgagcagcagcaccaataccggattgctggcgcgtgaatttatctgcaaaggggaggaagcctgatgagccagtcactgtttagccaaccattgaacgttattaacgtcggcatcgccatgtttagcgatgacctgaaaaagcagcatgtagaagtgactcaactcgactggacgccgccggggcagggcaatatgcaggtggtgcaggcgctggataacattgccgattcgccgctggcggacaaaatcgccgccgctaaccagcaggcgctggagcgtattatccagtcgcatccggtgctgattggttttgatcaggcgattaacgtggtgccgggcatgacggcgaaaaccattcttcacgccgggccgccgatcacctgggaaaaaatgtgcggcgcgatgaaaggcgcggtcaccggagcgctggtgttcgaaggactggcgaaagatctcgacgaggcggctgaactggcggcttccggggagatcaccttctcgccgtgtcacgagcacgactgcgtgggatcgatggcgggtgttacctcggcctcgatgtttatgcacatcgtaaaaaacaaaacctacggcaacatcgcttataccaacatgagcgagcagatggcgaagattttgcgtatgggcgctaacgaccagagcgtgattgaccgcctgaactggatgcgtgatgtgcagggaccaatactgcgcgacgcgatgaaaattatcggcgaaatcgatctgcgcttaatgctggcgcaggcgctgcatatgggcgatgagtgccataaccgcaataacgccgggacgacactgctgattcaggcgctgacgccggggattattcaggcgggttattccgtcgagcaacagcgcgaagtgtttgagtttgtcgccagcagcgactacttctccggcccgacgtggatggcgatgtgtaaagcggcgatggatgcggcgcatggcatcgaatacagcaccgtggtcaccaccatggcgcgtaacggcgtcgagttcggcctgcgggtcagcggcctgccggggcaatggtttaccggcccggcgcagcaggtgatcggcccgatgtttgccggttataagccggaagattcggggctggatatcggcgacagcgccatcaccgaaacctacggtattggcggatttgctatggcgaccgcgcccgctatcgtcgcgctggtgggcggcacggtggaagaagctattgatttctcccgtcagatgcgcgaaatcaccctcggtgaaaaccccaacgtcaccattccgctgctcggttttatgggcgtgccgtcggcaatcgacatcacccgcgtgggtagcagcggcattctgccggtgatcaacaccgccatcgcccataaagatgcgggcgtcggcatgattggcgcgggcattgtgcatccaccttttgcctgcttcgagaaagccattcttggctggtgcgaacgttacggcgtctgacctacatgttcatgccggatgcggcgtgaacgccttatccggcctacgaatggcgcaagaatctgtaggcctgataagcgtagcgcatcaggcatttgtcaccattgccggatgcggcgtgaacgccttatccggcctacgaatggcgcaagaatctgtaggcctgataagcgtagcgcatcaggcatttgccaccactgccggatgcggcgtggacgccttatccggcctacgagtggcgcgagaatctgtaggcctgataagcgtagcgcatcaggcatttgtcaccattgccggatgcggcgtgaacgccttatccggcctacgagtggcgcgagaattgtaggcctgataagcgtagcgcatcaggcagtctggcgttggtcataaccccatcaccctctgtagcggacataacaacatgaaagagcttgtggtcgttgccattggtggcaacagcattatcaaagataacgccagccagtcgattgagcatcaggcggaggcggtgaaagccgtcgccgatacggtgctggaaatgctggcttccgattacgacattgtgctgacccacggcaacgggccgcaggtcgggctggatttacgccgtgcggagattgcccacaagcgcgaagggctgcccttaacgccgctggcgaactgtgtggcagatacgcagggcggcatcggctatctgatccaacaggcgctgaataaccggctggcgcgtcacggcgagaagaaagccgtcaccgtggtgactcaggtggaagtggataaaaacgatccaggttttgcccatcccaccaagcccatcggcgcattctttagtgacagccagcgtgacgaattacaaaaggcaaaccctgactggtgttttgttgaagatgccgggcggggctatcgccgcgtggtcgcctcgccggaaccgaaacgtattgtcgaagcacctgccattaaagcgctgatccaacaaggttttgtcgtaattggcgcgggcggcggtggaattccggtagtgcgtactgacgcgggagattaccaaagcgtggacgcggttatcgacaaagatctctctaccgcgctgctggcccgtgaaattcacgccgacattcttgtgatcaccactggcgtcgaaaaagtgtgtattcactttggcaaaccgcagcagcaggcgctcgatcgggtggatattgccaccatgacccgctatatgcaggaagggcatttcccgcccggcagcatgttgccaaaaatcatcgccagcctgacatttttagaacaaggcggcaaagaagtgattatcaccacgccggaatgcctgcctgcggcgctgcgcggcgaaacgggcactcatattattaaaacgtaaggacgtaagatgaaagaaagcaatagccgccgtgaatttctgagccagagcggtaagatggtcaccgccgccgcgctgtttggtacctctgtgccgctcgcccatgcggcggtagctggcaccctaaactgcgaagcgaacaacaccatgaaaatcactgacccgcattactatctcgataacgtgctgctggaaaccggttttgactacgaaaatggcgtggcggtgcagacccgcacggcgcgccagaccgtggagattcaggacggcaaaattgtcgccctgcgcgagaacaagctgcatccggacgccacgctgccgcactatgacgctggcggtaagctgatgctgcccaccacccgcgacatgcatattcatctcgacaaaaccttttacggcgggccgtggcgctcgctcaatcgtccggcaggcaccaccatccaggacatgatcaaactcgagcagaaaatgctgccggaactgcaaccgtacactcaggagcgggcagaaaaactgattgatttattgcagtcgaaaggcaccaccattgcccgcagccactgcaatatcgaaccggtttccggcctgaaaaatctgcaaaatttgcaggcggtgctggcgcgacgtcaggcgggctttgagtgtgaaatcgtcgccttcccgcagcacggtttgctgctgtcgaaatctgaacctttaatgcgtgaagcgatgcaggcgggggcgcattacgtcggcggcctggacccgaccagtgttgatggcgcgatggaaaaatccctcgacaccatgttccagattgcgctggactacgacaaaggcgtcgatattcacctgcacgaaaccactccggcaggcgtggcagccatcaattatatggttgaaacggtagagaaaacgccacagctgaagggcaagctgaccatcagtcacgcctttgcgctggcaacgctcaacgagcaacaggtagatgaactggcgaaccggatggtggtgcaacaaatttctatcgcctcgacggtgccgattggcacgctgcatatgccgctcaaacagttgcacgacaaaggcgtaaaagtgatgactggcactgacagcgttatcgaccactggtcgccttatggtctgggcgacatgctggaaaaagccaatctgtacgcgcagctctatattcgtcctaacgaacagaacctctcccgctcgctgtttttagccactggcgatgtattgccgctgaatgaaaaaggcgagcgtgtatggccaaaagcgcaggatgacgccagctttgtgctggtggacgcctcctgttccgccgaggcggtggcgcgtatctcgccgagaaccgcaacgttccataaagggcaactggtgtgggggagtgtggcaggttgatgcgcatttgaaacgcctgcaacggtgaatagtaagagatttaagccccagggagtggggcaatctgaatatgagtgtgtcggcagaaatggacattatctttgaggaatatgcccttattgacgttgtgtagataactatttgtctacgtgaaaagatcatcagttttgccgattttagtcttttacagatagcaaatatcacacttacaggcgctcgccttatggggaacgttgctgctctgtttcattcaggctcgcggcatgttggggctggatcgggtggtttaaatattggctatattcaatggacgcgttttgccgcgatgacatatcaggcgttgccaaatacacatagctaatcaggagtaaacacaatgaagatcaaagctgttggtgcatattccgctaaacaaccacttgaaccgatggatatcacccggcgtgaaccgggaccgaatgatgtcaaaatcgaaatcgcttactgtggcgtttgccattccgatctccaccaggtccgttccgagtgggcggggacggtttacccctgcgtgccgggtcatgaaattgtggggcgtgtggtagccgttggtgatcaggtagaaaaatatgcgccgggcgatctggtcggtgtcggctgcattgtcgacagttgtaaacattgcgaagagtgtgaagacgggttggaaaactactgtgatcacatgaccggcacctataactcgccgacgccggacgaaccgggccatactctgggcggctactcacaacagatcgtcgttcatgagcgatatgttctgcgtattcgtcacccgcaagagcagctggcggcggtggctcctttgttgtgtgcagggatcaccacgtattcgccgctacgtcactggcaggccgggccgggtaaaaaagtgggcgtggtcggcatcggcggtctgggacatatggggattaagctggcccacgcgatgggggcacatgtggtggcatttaccacttctgaggcaaaacgcgaagcggcaaaagccctgggggccgatgaagttgttaactcacgcaatgccgatgagatggcggctcatctgaagagtttcgatttcattttgaatacagtagctgcgccacataatctcgacgattttaccaccttgctgaagcgtgatggcaccatgacgctggttggtgcgcctgcgacaccgcataaatcgccggaagttttcaacctgatcatgaaacgccgtgcgatagccggttctatgattggcggcattccagaaactcaggagatgctcgatttttgcgccgaacatggcatcgtggctgatatagagatgattcgggccgatcaaattaatgaagcctatgagcgaatgctgcgcggtgatgtgaaatatcgttttgttatcgataatcgcacactaacagactgaaaaaattaataaataccctgtggtttaacatattaacttcgctctccacttaactttttagttaaggagagcgaaataatatcaaagtagcagtaaaacctataacgtaaatttaaattgttaaattaacgccctccagtacacaatacttcacacgttagttatgagcgatttctgatagtgcctggtttaatcagagctttattatctgcgacgtttatttttatttaagagagatcgcgatgatatcattaaaagctccgcacaataatttgatgccatatacgcaacaaagcatacttaatacggttaaaaacaatcagttaccagaggatatcaaaagctccctggtttcctgtgtcgatatattcaaggttttgattaaacaatattatgattatccttatgattgtcgtgatgatttagtcgatgacgacaaactcattcatctcatggctgccgtacgagactgtgagtggtcagacgataacgcactcaccataaatgtgcagtttaatgatttccctggattttatgactggatggattaccctgatcacccggttaagtttgtttttcacatacttgaaaatcaaaaagggacagtttgggtatatgaccaggatgatgcgtttcttgatattaaagcaaacgtgcaggctggacgctttaccgggcttaagaaattagtgcagtttatcgattcagtgcgaacagattgcaaatgtattcttcttgaataccatatgcctttgctgagaattttccctaaagggaaagagtgtatgcatgtggaaaaatggcttcgcgaaatgtcgtctattccggagacagacgcgcccattaagcaggcgcttgcgcatggattattattacacttaaaaaatatctaccctgtttttcctgaatcactggtgatgttattgctctctgttctggacgtaaaaacatacagagatgatgcgcgattaaatgaatggatatctaatagagtgcaggaattaggtgacagatattatcctgtaaataagcacgttaaaatccgctacactctttagttcagaaagggttccacctgcaagttgttattccacctgagagtgaatcgcaatgcaggtaatcatttcatctgtatatctgtatgccaactggcattccatctcttttttcgccgatattttgttgtgatcggcgacacttcgcttaaaaaagcaccagtagtggtttcgcagccatgcggtgtataaaaaatgatctcatgcagatgttttgtgaatgtgttggttgacattcatatgaaaaaaatcataattccatcatgtttgtgtggggtcttttctgtatcttacgcatcgcactcaagcctgacagaaaatatgctgtaaggctcatatcaaaaaccgccattagctcatcaggaagagcagacgacaaccaggattgttgtatggtacggggttcgaggcctcgatggcggtccaacttttcaaaactcttctgaatcagatccccttattatcatccctgcaaagtggaacattgccattgtttggctattcaggatggggcagaccaatgaaaaaagcccacacaggggagagtgggctgaaatgggaagctaaagactcaagtaaacttatcggaaataaggaccacgcattacgggggctatcatcgccgatggccgtgattcggcaaatcaggttgattacgtagagagtaaattatctgctcaccgctgcgtcaccccttcgtaaatcaggcgtagcgcgaatacaccaataattgcaccaataacccgactggcaacgcgttgcatacgcccataagcacgacgcacagcgggcaaagaaaacgcctgactaagaaaaactcgccagataattgatgcgagcacaatccccgcccaggccattaaacgtgcccatgttggtgtttcggcatttaatgttactgagaaaatactgataaaaaataaaacggtttgcgggttagagagatcggtaattaatccgcggcgaaaaaagacataccagggggcgctaatcggttgttgtagtgtgctcatttgcggtgttgactggcggcgcatgctgcaccacgcaaaccataagagataagcgccgccgacgattctgataagcgaaaaaatctcctcacactgcgtaattagcgttgcaagaccaaacaaacccaacccggaataaaatgcatcgcccagcgccacgcccagcccggtcagcacccctgcgcgtcgaccggaagccaggctggtttgtactaccacaaagagattggctcccggattaaaaaaagtaatcacgaacagtcctacggtcaggtaaacggcatgcaaaggatccatagtgatttcatccataaataagtgaactaactgcatcatatttctaccaaaaataatcgggtgcgagagagatcacaaagtgtcttatttccggttactggcgtttatgccctgactgaactaattattaatcaacccaataatgtgggtgggtgatagtgtgataacaactctggagccgtaatatgaaaataatctctaaaatgttagtcggtgcgttagcgttagccgttaccaatgtctatgccgctgaattgatgaccaaagcggaatttgaaaaagttgaatcgcagtatgaaaaaataggtgatatttcaaccagcaatgaaatgtcgactgcagatgcaaaagaagatttgatcaaaaaagcggatgaaaaaggggctgatgtgttggtactgacctccggtcaaactgacaataagatccacggcacggcaaatatttataagaagaagtaattctgaatcctatgtaaacatctccgatgcgtaagtttatcggtgatcatctattgaaatttatgccggataaagcgttcgcgctgcattcggcagttcagcttttcagccgccgccagaacgtcgtccggctgatgcctaaataattcgccgctgctgttttatcgccattaaatttctccagtgcctgttgtggtgtcagtaagcgtggagcgggagttttcgccgactcgcgcgccagttccggcagtagcagttgcataaactgcggcgttaaatccggcgtcggttccacacttaaaaacagcgccagtcgttccatcatattgcgcagttcacgaatattgcctggccagtcgtagtgcagcagcacagtttcacttgcctgtaacccctggcgtaatgcagcagaaaatggggcggagagcgccgccagagacactttcaaaaagctttccgccagcggaagaatatccgccacccgctcgcgcagtggtggcaattgcagacgcaaaatactcagccgataaaacagatcacggcgaaaacgtccttgctgcatatcttcttccagattgcagtgagtggcgctaatgacccgtacatctaccggaacaggctgatgcccgccgacgcgggtgacctctttttcttccagcacccgcagcagccgggtctgcaaaggtagcggcatttcgccaatctcatccagaaacagcgtaccgccgtgggcaatttcgaacagcccggcgcgacctccgcgtcgcgagccggtaaacgccccttcctcatagccaaacagttctgcttccagcagcgattcggcaatcgccccgcagttgacggcaacaaacggatgcgactttttgccctgtcgcgcatcgtggcgggcaaaatattcccgatgaatcgcctgggccgccagctctttgcccgtccccgtttccccctcaatcaacaccgccgcactggagcgggcatacagcaaaatagtctgccgtacttgttccatctgtggtgattgaccgagcatatcgcccagcacgtaacgagtacgcagggcgttgcgggtggcatcgtgagtgttatggcgtaacgacatgcgcgtcatatccagcgcatcgctgaacgcctggcgcacggtggcggcggaatagataaaaattccggtcattccggcttcttctgccaaatcggtaatcagccctgcgccgaccaccgcttcggtgccgttagcttttagctcgttaatctgcccgcgtgcgtcttcctcggtaatgtagctacgttggtcgaggcgcaaattaaaggttttttgaaacgccaccagcgctggaatggtttcctgataggtgacaacgccgatagaagaggtgagttttccggcttttgccagtgcctgtaacacatcgtagccgctcggtttaatcaaaataactggcactgacaggcggcttttcaggtacgcgccgttagagccagccgcgatgatggcgtcacagcgttcgtttgccagtttcttgcggatgtaggtcactgctttttcaaagccaagctgaataggggtaatgttcgccaggtgatcaaactcgaggctgatatcgcgaaacagctcgaacaggcgcgttacagataccgtccagataaccggtttgtcgtcattaagccgtggtggatgtgccatagcgcaccgcaaagttaagaaaccgaatattgggtttagtcttgtttcataattgttgcaatgaaacgcggtgaaacattgcctgaaacgttaactgaaacgcatatttgcggattagttcatgactttatctctaacaaattgaaattaaacatttaattttattaaggcaattgtggcacaccccttgctttgtctttatcaacgcaaataacaagttgataacaaaggatgggctatgtctctacactctccaggtaaagcgtttcgcgctgcactgactaaagaaaatccattgcagattgttggcaccatcaacgctaatcatgcgctgttggcgcagcgtgccggatatcaggcaatttatctttctggcggtggcgtggcggcaggttcgctggggctgcccgatctcggtatttctacccttgatgatgtgctgaccgacattcgccgtatcaccgacgtttgttcgctgccgctgctggtggatgcggatatcggttttggttcttcggcctttaacgtggcgcgcaccgtgaaatcgatgattaaagccggtgcggcaggattgcatattgaagatcaggttggtgcgaaacgctgcggtcatcgtccgaataaagcgatcgtctcgaaagaagagatggtggatcggatccgcgcggcggtggatgcgaaaaccgatcctgattttgtgatcatggcgcgcaccgatgctctggcggtagaggggctggatgcggcgatcgagcgtgcgcaggcctatgttgaagcgggtgccgagatgttgttcccggaggcgattaccgaactcgccatgtaccgccagtttgccgatgcggtgcaggtgccgatcctcgccaacatcaccgaatttggtgccacgccgctgtttaccaccgacgaattacgcagcgcccatgtcgcaatggcgctgtacccactttcagcgttccgcgccatgaaccgcgccgctgaacatgtctacaacgtcctgcgccaggaaggcacgcagaaaagcgtcatcgacaccatgcagacccgcaacgagctgtacgaaagcatcaactactaccagtacgaagagaagctcgacaacctgtttgcccgtagccaggtgaaataaaaaacgcccgttgattgtattcgacagccgatgcctgatgcgtcgctgacgcgacttatcaggcctacgaggtgcactgaactgtaggtcggataagacggatggcgtcgcatccgacaaccgatgcctgatgcgccgctgacgtgacttatcaggcctacggggtgcactgaactgtaggtcggataagacgcatagcgtcgcatccgacaaccgatgcctgatgcgccgctgacgcgacttatcaggcctacggggtgcactgaactgtaggtcggataagacgcatagcgtcgcatccgacaaccgatgcctgatgcgccgctgacgcgacttatcaggcctacggggtgaactgaactgtaggtcggataagacgcatagcgtcgcatccgacaacaatctcgaccctacaaatgataacaatgacgaggacaacatgagcgacacaacgatcctgcaaaacagtacccatgtcattaaaccgaaaaaatctgtggcactttctggcgttccggcgggcaatacggcgctctgcaccgtgggtaaaagtggcaatgacctgcattaccgcggctacgatattcttgatctggcgaaacattgcgaatttgaagaagtggcgcatctgctgatccacggcaaactgccgacccgtgacgaactcgccgcttacaaaacgaaactgaaagccctgcgcggtttaccggctaacgtgcgtaccgtgctggaagccttaccggcggcgtcgcacccgatggatgttatgcgcaccggtgtttccgcgctcggctgcacgctgccagaaaaagaggggcataccgtctctggcgcgcgggatattgccgacaaactgctggcgtcgcttagctcgattctcctttattggtatcactacagccacaacggcgaacgcatccaaccggaaaccgatgacgactccatcggcggtcacttcctgcatctgctgcacggcgaaaagccatcgcaaagctgggaaaaggcgatgcatatctcgctggtgctgtacgccgaacacgagtttaacgcctccacctttaccagtcgggtgattgcgggcaccggctctgatatgtattccgcgattattggcgcgattggcgcactgcgcgggccaaaacacggcggggcgaatgaagtgtcgctggagatccagcaacgctacgaaacgccggacgaagccgaagcagatatccgcaagcgcgtggaaaacaaagaagtggtcattggttttggtcatccggtttacaccatcgctgacccgcgccaccaggtgattaaacgtgtggcgaagcagctctcgcaggaaggcggctcgctgaagatgtacaacatcgccgatcgcctggaaacggtgatgtgggagagcaaaaagatgttccccaatctcgactggttctctgctgtttcctacaacatgatgggcgttcccaccgagatgttcacaccactgtttgttatcgcccgcgtcaccggctgggcggcgcacattatcgaacaacgtcaggacaacaaaattatccgtccttccgccaattatgttggaccggaagaccgcccgtttgtcgcgctggataagcgccagtaaacctctacgaataacaataaggaaacgtacccaatgtcagctcaaatcaacaacatccgcccggaatttgatcgtgaaatcgttgatatcgtcgattacgtcatgaactacgaaatcagctctaaagtggcctacgacaccgcacattactgcctgctcgacacgctcggctgcggtctggaagctctcgaatacccggcctgtaaaaaactgctggggccaattgttcccggcaccgtcgtacccaacggcgtgcgcgtccccggaactcagttccagctcgaccccgtccaggcggcatttaacatcggcgcgatgatccgctggctcgatttcaacgatacctggctggcggcggagtggggccatccttccgacaacctcggcggcattctggcaacggcggactggctttcgcgcaacgcggtcgccagcggcaaagcgccgttgaccatgaaacaggtgctgaccgcaatgatcaaagcccatgaaattcagggctgcatcgcgctggaaaactcctttaaccgcgtcggcctcgaccacgttctgttagtgaaagtggcttccaccgccgtggtcgccgaaatgctcggcctgacccgcgaggaaattctcaacgccgtttcgctggcgtgggtggacggtcagtcgctgcgcacctatcgccatgcgccgaacaccggcacgcgtaaatcctgggcggcgggcgatgccacttcccgcgcggtacgtctggcactgatggcgaaaacgggcgaaatgggttacccgtcagccctgactgcgccggtgtggggcttctacgacgtctcctttaaaggtgaatcgttccgcttccagcgcccgtacggttcctacgttatggaaaatgtgctgttcaaaatctccttcccggcggagttccactcccagacggcagttgaagcagcgatgacgctctatgaacagatgcaggcagcaggcaaaacggcggcggatatcgaaaaagtgaccattcgcacccacgaagcctgtattcgcatcatcgacaaaaaagggccgctcaataacccggcagaccgcgatcactgcattcagtacatggtggcgatcccgctgctattcgggcgcttaacggcggcagattacgaggacaacgttgcgcaagataaacgcattgacgccctgcgcgagaagatcaattgctttgaagatccggcatttaccgctgactaccacgacccggaaaaacgcgccatcgccaatgccattacccttgagttcaccgacggcacacgatttgaagaagtggtggtggagtaccccattggtcatgctcgccgccgtcaggatggtattccgaaactggtcgataaattcaaaatcaatctcgcgcgccagttcccgactcgccaacagcagcgcattctggaggtttctctcgacagagctcgcctggaacagatgccggtcaatgagtatctcgacctgtacgtcatttaagtaaacggcggtaaggcgtaagttcaacaggagagcattatgtcttttagcgaattttatcagcgttcgattaacgaaccggagcagttctgggccgagcaggcccggcgtattgactggcagacgccctttacgcaaacgctcgatcacagcaatccgccgtttgcccgttggttttgtgaaggccgaaccaacttgtgccacaacgccatcgaccgctggctggagaaacagccagaggcgctggcgctgattgccgtctcttcggaaacagaagaagagcgcacctttacctttcgtcagctgcatgacgaagtgaacgcggtggcctcaatgttgcgttcattgggtgtgcagcgcggcgatcgggtgctggtgtatatgccgatgattgccgaagcgcatattactctgctggcctgcgcgcgcattggcgctattcactcggtggtgtttggtggatttgcctcgcacagcgtggcggcgcgaattgatgacgctaaaccggtgctgattgtctcggctgatgccggagcgcgcggtggcaaaatcattccctataaaaaattgctcgacgatgcgataagtcaggcgcagcaccagccacgccatgttttgctggtggatcgcgggctggcgaaaatggcgcgcgtcagcgggcgggatgtcgatttcgcgtcgttgcgccatcaacacatcggcgcgcgggtaccggtggcgtggctggaatccaacgaaacctcctgcattctctacacttccggcacgaccggcaaacctaaaggcgtgcagcgtgacgtcggcggatatgcggtggcgctggcgacctcgatggacaccatttttggcggcaaagcgggcagcgtgttcttttgcgcatcggatatcggctgggtggtggggcattcgtatatcgtttacgcgccgctgctggcggggatggcgactatcgtttacgaaggattgccgacctggccggactgcggcgtgtggtggacaatcgtcgagaaatatcaggttagccggatgttctcagcgccgaccgccattcgcgtgctgaaaaaattccctaccgctgaaattcgcaaacacgatctctcgtcgctggaagtgctctatctggctggagaaccgctggacgagccgaccgccagttgggtgagcaatacgctggatgtgccggtcatcgacaactactggcagaccgaatccggctggccgattatggcgattgctcgcggtctggacgacaggccgacgcgtctgggaagccccggtgtgccgatgtatggctataacgtgcagttgcttaatgaagtcaccggcgaaccgtgtggcgtcaacgagaaagggatgctggtggtggaagggccgctgccgccggggtgtattcagaccatctggggcgacgacggccgctttgtgaagacttactggtcgctgttttcccgcccggtgtacgccacctttgactggggcatccgtgacgctgacggttatcactttattctcgggcgcactgacgatgtaattaacgttgccgggcatcggctggggacgcgcgagattgaagagagtatctccagccatccgggcgttgccgaagtggcggtggttggggtgaaagatgcgctgaaagggcaggtggcggtggcgtttgtcattccgaaagagagcgacagtctggaagatcgtgatgtggcgcactcgcaagagaaggcgattatggcgctggtggacagccagattggcaactttggccgcccggcgcacgtctggtttgtctcgcaattgccaaaaacgcgatccggaaaaatgctgcgccgcacgatccaggcgatttgcgaaggacgcgatcctggagatctgacgaccattgatgatcctgcgtcgttggatcagatccgccaggcgatggaagagtaggttattgtcggatgcgtcgcgcggtgcatccggcactgtgtgccgatgcctgatgcgacgctgacgcgttttatcatgcctacggacctgaaccgtaggtcggataaggcgctcgcgtcgcatccgacaccatgctcagatgcctgatgcgacgctgacgcgtcttatcaggcctacccactgtttttacaccgataatttttcccccacctttttgcactcattcatataaaaaatatatttccccacgaaaacgattgctttttatcttcagatgaatagaatgcggcggattttttgggtttcaaacagcaaaaagggggaatttcgtgtcgcaagataacaactttagccaggggccagtcccgcagtcggcgcggaaaggggtattggcattgacgttcgtcatgctgggattaaccttcttttccgccagtatgtggaccggcggcactctcggaaccggtcttagctatcatgatttcttcctcgcagttctcatcggtaatcttctcctcggtatttacacttcatttctcggttacattggcgcaaaaaccggcctgaccactcatcttcttgctcgcttctcgtttggtgttaaaggctcatggctgccttcactgctactgggcggaactcaggttggctggtttggcgtcggtgtggcgatgtttgccattccggtgggtaaggcaaccgggctggatattaatttgctgattgccgtttccggtttactgatgaccgtcaccgtcttttttggcatttcggcgctgacggttctttcggtgattgcggttccggctatcgcctgcctgggcggttattccgtgtggctggctgttaacggcatgggcggcctggacgcattaaaagcggtcgttcccgcacaaccgttagatttcaatgtcgcgctggcgctggttgtggggtcatttatcagtgcgggtacgctcaccgctgactttgtccggtttggtcgcaatgccaaactggcggtgctggtggcgatggtggcctttttcctcggcaactcgttgatgtttattttcggtgcagcgggcgctgcggcactgggcatggcggatatctctgatgtgatgattgctcagggcctgctgctgcctgcgattgtggtgctggggctgaatatctggaccaccaacgataacgcactctatgcgtcgggtttaggtttcgccaacattaccgggatgtcgagcaaaaccctttcggtaatcaacggtattatcggtacggtctgcgcattatggctgtataacaattttgtcggctggttgaccttcctttcggcagctattcctccagtgggtggcgtgatcatcgccgactatctgatgaaccgtcgccgctatgagcactttgcgaccacgcgtatgatgagtgtcaattgggtggcgattctggcggtcgccttggggattgctgcaggccactggttaccgggaattgttccggtcaacgcggtattaggtggcgcgctgagctatctgatccttaacccgattttgaatcgtaaaacgacagcagcaatgacgcatgtggaggctaacagtgtcgaataacgctttacaaacaattattaacgcccggttaccaggcgaagaggggctgtggcagattcatctgcaggacggaaaaatcagcgccattgatgcgcaatccggcgtgatgcccataactgaaaacagcctggatgccgaacaaggtttagttataccgccgtttgtggagccacatattcacctggacaccacgcaaaccgccggacaaccgaactggaatcagtccggcacgctgtttgaaggcattgaacgctgggccgagcgcaaagcgttattaacccatgacgatgtgaaacaacgcgcatggcaaacgctgaaatggcagattgccaacggcattcagcatgtgcgtacccatgtcgatgtttcggatgcaacgctaactgcgctgaaagcaatgctggaagtgaagcaggaagtcgcgccgtggattgatctgcaaatcgtcgccttccctcaggaagggattttgtcgtatcccaacggtgaagcgttgctggaagaggcgttacgcttaggggcagatgtagtgggggcgattccgcattttgaatttacccgtgaatacggcgtggagtcgctgcataaaaccttcgccctggcgcaaaaatacgaccgtctcatcgacgttcactgtgatgagatcgatgacgagcagtcgcgctttgtcgaaaccgttgctgccctggcgcaccatgaaggcatgggcgcgcgagtcaccgccagccacaccacggcaatgcactcctataacggggcgtatacctcacgcctgttccgcttgctgaaaatgtccggtattaactttgtcgccaacccgctggtcaatattcatctgcaaggacgtttcgatacgtatccaaaacgtcgcggcatcacgcgcgttaaagagatgctggagtccggcattaacgtctgctttggtcacgatgatgtcttcgatccgtggtatccgctgggaacggcgaatatgctgcaagtgctgcatatggggctgcatgtttgccagttgatgggctacgggcagattaacgatggcctgaatttaatcacccaccacagcgcaaggacgttgaatttgcaggattacggcattgccgccggaaacagcgccaacctgattatcctgccggctgaaaatgggtttgatgcgctgcgccgtcaggttccggtacgttattcggtacgtggcggcaaggtgattgccagcacacaaccggcacaaaccaccgtatatctggagcagccagaagccatcgattacaaacgttgaacgactgggttacagcgagcttagtttatgccggatgcggcgtgaacgccttatccggcctacgtagagcactgaactcgtaggcctgataagcgtagcgcatcaggcaattccagccgctgatctgtgtcagcggctaccgtgattcattcccgccaacaaccgcgcattcctccaacgccatgtgcaaaaatgccttcgcagcggctgtctgccagctgtagtttatgccggatgcggcgtgaacgccttatccggcctacgtagagcactgaactcgtaggcctgataagcgtagcgcatcaggcaattccagccgcagacctgtgtcagcggctaccgtgattcatttccgccaacaaccgcgcatttatccaacgccatgtgcaaaaatgccttcgcggcggctgtctgccagctatttttccgccgcaacaaaaccgccgttctctccagtagtggcggggcaagagaaatagctttaagcccgtcatgttgtgtggcaatcgctgctggtaacaatgtggaaagggaagtgcggcgaatcagctccagaaccgcgctaattgagttcgcctcaatgaccacctgtggatgtagccccgctttctcgcagtagtggtcaatttgctctctggtggcaaattccgcgctgagcaggaccagtttttcatcatgcaagcgactcaacgccacctgttcatggacggccagcggatgatgttgcgccacgactaacgctaaactttctgtcagtaaaggaattgcctccagctccggcgaatgcacaggcgcgaaggcaatcccaacgtccaactcgtcgcggcaaagcatatcctcgattttctcctgcgacatttcctgtagctggagcgtgatgctgggatagcgcgcatagaaatccgccattaaggggccgataaagtagctcgtaaaggtgggggtgacggcgatacgcagcgatcctcgcgtcagatcggcaacatcatgaatcgcccgtttacccgcccccagttcctgtaacgcccggctggcgtactgtcgccagacttctcctgcatcagtgagacgaatcgttcgcccgctacggtcaaacagcggcacgcctaaactctcctctaactggcgaatctgctgggaaagcgcaggttgggagacgtgcaacgcactggcggcacgggtgaagctgccatgttcagccacggcaagaaaataattgatatgtcgagagagcattcgcaacctataagtaaatccaatggaactcatcataaatgagacttttaccttatgacaatcggcgagtagtctgcctctcattccagagacagacagaggttaacggtgaaagagattattgatggattccttaaattccagcgcgaggcatttccgaagcgggaagccttgtttaaacagctggcgacacagcaaagcccgcgcacactttttatctcctgctccgacagccgtctggtccctgagctggtgacgcaacgtgagcctggcgatctgttcgttattcgcaacgcgggcaatatcgtcccttcctacgggccggaacccggtggcgtttctgcttcggtggagtatgccgtcgctgcgcttcgggtatctgacattgtgatttgtggtcattccaactgtggcgcgatgaccgccattgccagctgtcagtgcatggaccatatgcctgccgtctcccactggctgcgttatgccgattcagcccgcgtcgttaatgaggcgcgcccgcattccgatttaccgtcaaaagctgcggcgatggtacgtgaaaacgtcattgctcagttggctaatttgcaaactcatccatcggtgcgcctggcgctcgaagaggggcggatcgccctgcacggctgggtctacgacattgaaagcggcagcatcgcagcttttgacggcgcaacccgccagtttgtgccactggccgctaatcctcgcgtttgtgccataccgctacgccaaccgaccgcagcgtaaccttatttttaaaccatcaggagttccaccatgattcagtcacaaattaaccgcaatattcgtcttgatcttgccgatgccattttgctcagcaaagctaaaaaagatctctcatttgccgagattgccgacggcaccggtctggcagaagcctttgtaaccgcggctttgctgggtcagcaggcgcttcctgccgacgccgcccgcctggtcggggcgaagctggatctcgacgaagactccattctactgttgcagatgattccactgcgtggctgcattgatgaccgtattccaactgacccaacgatgtatcgtttctatgaaatgttgcaggtgtacggtacaaccctgaaagcgttggttcatgagaaatttggcgatggcattattagcgcgattaacttcaaactcgacgttaagaaagtggcggacccggaaggtggcgaacgtgcggtcatcaccttagatggtaaatatctgccgaccaaaccgttctgacagccatgcgcaaccatcaaaagacgttcacgatgctgctggtactggtgctgattggtcttaatatgcgaccactgctcacctccgtcgggccactgctaccgcaattgcgccaggcgagcggaatgagctttagcgtggctgccctgttgaccgctctgccggtggttaccatgggcgggctggcgctggccggaagctggcttcatcagcatgtcagcgaacgtcgcagtgtcgccatcagtctgttgctgattgccgtcggtgcattgatgcgtgagctttacccgcaaagtgcgctgctgcttagcagcgcactgcttggtggggtggggatcggcatcattcaggcggtgatgccttcggtgattaaacggcggtttcagcagcgcacgccactggtgatggggctgtggtccgcggctctgatgggcggcggtgggcttggtgccgccataacgccctggttagttcaacatagcgaaacctggtatcaaacactcgcctggtgggcgctgcctgccgttgttgcgctctttgcctggtggtggcaaagcgcccgcgaggtcgcctcttcccacaagacaacaaccactccggttcgcgtggtattcactccccgcgcgtggacgctgggtgtttacttcggtctgattaacggcggttacgccagcctgattgcctggttacccgctttctatattgagattggtgccagcgcgcagtacagcggttccttactggcattgatgacgcttgggcaagccgcaggagctttgctgatgcctgctatggctcgccatcaggatcggcgcaaactgttaatgctggcgctggtgttacaactggtggggttctgcggctttatctggctgccgatgcaattgccggtattgtgggcgatggtgtgtgggttaggtctgggcggcgcgtttccgctctgtttgctgctggcgctcgatcactctgtgcaaccggctattgctggcaagctggtggcgtttatgcagggaatcggttttatcatcgccgggcttgccccgtggttttctggcgtgctgcgtagtatcagcggcaattacctgatggactgggcatttcatgcgctgtgcgtcgttgggctgatgatcataaccctgcgttttgcaccagtacgttttccgcagctgtgggtcaaagaggcatgatgcgacgcttgttcctgcgctttgttcatgccggatgcggctaatgtagatcgctgaacttgtaggcctgataagcgcagcgtatcaggcaatttttataatttaaactgacgattcaactttataatctttgaaataatagtgcttatcccggtcgtttatttcgcgaataacccgacaaggaacgccagccgccacgacgtttggtggaatgtcttttgtgacgatactacccgcgccaataacagaattatccccgatggtgacgcctggattaataaccacatgacttccgatccagacgttattgccaatcgttatcggaaaagagtacatctcgccgttttttctcaattcatggtgtacagggtgtcccgtaacggaaagagtaacgttgggtgcaatcagtacgttatcaccgattgttaccgtgtagtcatcgacaatggttaaattgaaatttgcataaaaattgcggcctatatggatgttggaaccgtaagagaaatagacaggcggttctacccaggcgttttcccctaccgtggcaaacatttctttaatcaggctttctcttttttcaacttctgatggatgcgagtgattaaactcatacattaacgttttcccacgaagtcttttttccggtaagccttcgcacatatcggtaaatagcttgcctgctcttattctttcggtcattggcatgttcaatgcgatcactccgttatgatatgttggtcggataaggcgctcgcgccgcatccgacattgattgcttaagcgacttcattcacctgacgacgcagcagggaaagcgggccggggccgctaagcgtgaacacggaaattaaggtgaagcccagcgccaccagacccagcaccagataagcgccctggaaaccgatgctttcatacatattgcccgccagtacagacataaaaatcatcgccagttgcttaaagaagcagaaacagaccagataaatcgtcgctgaaaaacgcacttcaaactggctggtaatatatttaaagcagcccaccagcaggaacggtacttcaaacatatgcagcgttttcagaataaccacttccagcgctgaggtggcgaacgatgagccaataatacgtacagacataatagtgccagccagcagcagggcgtttttcccaccgatgcgattaatgatcagtggcgcaaagaacataatcgaggcgttaagtaattcgcccattgtcgttacgtagccaaatacccgcgtaccctgttcaccggtagcaaagaacgaagtaaagaaattagcaaactgttggtcaaaaacatcgtaggtgcaggaaacgccaataacatacagtgacaaaaaccacagttttggctgtctgaacagttccagtgccagcttaaggctaaatgccgaatggttggcacctaccgcattggcaaccgtggcagaagagggcgcatccgttttggcgaaaaagagtaaaacggcgaggatgagtgcacagccagagcccagccagaaaacaaactgattattgatggtgaacatgatgccgacaatcgaggcacacagcgcccagccaacacagccaaacatccgcgcgcgaccaaattcgaaattactgcgacggctgactttctcaataaatgcctctactgctggcgcaccggcgttaaaacaaaagcctagataaataccaccaacaatcgatcctactaaaatgttgtattgtaacagtggcccgaagataaaaataaagaacggcgcaaacatcactaacatgccggtaataatccacagcaggtatttgcgcagcccgagtttgtcagaaagcagaccaaacagcggttggaataatagcgagaacagagaaatagcggcaaaaataatacccgtatcacttttgctgatatggttgatgtcatgtagccaaatcgggaaaaacgggaagtaggctcccatgataaaaaagtaaaagaaaaagaataaaccgaacatccaaaagtttgtgttttttaaatagtacataatggatttccttacgcgaaatacgggcagacatggcctgcccggttattattatttttgacaccagaccaactggtaatggtagcgaccggcgctcagctggaattccgccgatactgacgggctccaggagtcgtcgccaccaatccccatatggaaaccgtcgatattcagccatgtgccttcttccgcgtgcagcagatggcgatggctggtttccatcagttgctgttgactgtagcggctgatgttgaactggaagtcgccgcgccactggtgtgggccataattcaattcgcgcgtcccgcagcgcagaccgttttcgctcgggaagacgtacggggtatacatgtctgacaatggcagatcccagcggtcaaaacaggcggcagtaaggcggtcgggatagttttcttgcggccctaatccgagccagtttacccgctctgctacctgcgccagctggcagttcaggccaatccgcgccggatgcggtgtatcgctcgccacttcaacatcaacggtaatcgccatttgaccactaccatcaatccggtaggttttccggctgataaataaggttttcccctgatgctgccacgcgtgagcggtcgtaatcagcaccgcatcagcaagtgtatctgccgtgcactgcaacaacgctgcttcggcctggtaatggcccgccgccttccagcgttcgacccaggcgttagggtcaatgcgggtcgcttcacttacgccaatgtcgttatccagcggtgcacgggtgaactgatcgcgcagcggcgtcagcagttgttttttatcgccaatccacatctgtgaaagaaagcctgactggcggttaaattgccaacgcttattacccagctcgatgcaaaaatccatttcgctggtggtcagatgcgggatggcgtgggacgcggcggggagcgtcacactgaggttttccgccagacgccactgctgccaggcgctgatgtgcccggcttctgaccatgcggtcgcgttcggttgcactacgcgtactgtgagccagagttgcccggcgctctccggctgcggtagttcaggcagttcaatcaactgtttaccttgtggagcgacatccagaggcacttcaccgcttgccagcggcttaccatccagcgccaccatccagtgcaggagctcgttatcgctatgacggaacaggtattcgctggtcacttcgatggtttgcccggataaacggaactggaaaaactgctgctggtgttttgcttccgtcagcgctggatgcggcgtgcggtcggcaaagaccagaccgttcatacagaactggcgatcgttcggcgtatcgccaaaatcaccgccgtaagccgaccacgggttgccgttttcatcatatttaatcagcgactgatccacccagtcccagacgaagccgccctgtaaacggggatactgacgaaacgcctgccagtatttagcgaaaccgccaagactgttacccatcgcgtgggcgtattcgcaaaggatcagcgggcgcgtctctccaggtagcgaaagccattttttgatggaccatttcggcacagccgggaagggctggtcttcatccacgcgcgcgtacatcgggcaaataatatcggtggccgtggtgtcggctccgccgccttcatactgcaccgggcgggaaggatcgacagatttgatccagcgatacagcgcgtcgtgattagcgccgtggcctgattcattccccagcgaccagatgatcacactcgggtgattacgatcgcgctgcaccattcgcgttacgcgttcgctcatcgccggtagccagcgcggatcatcggtcagacgattcattggcaccatgccgtgggtttcaatattggcttcatccaccacatacaggccgtagcggtcgcacagcgtgtaccacagcggatggttcggataatgcgaacagcgcacggcgttaaagttgttctgcttcatcagcaggatatcctgcaccatcgtctgctcatccatgacctgaccatgcagaggatgatgctcgtgacggttaacgcctcgaatcagcaacggcttgccgttcagcagcagcagaccattttcaatccgcacctcgcggaaaccgacatcgcaggcttctgcttcaatcagcgtgccgtcggcggtgtgcagttcaaccaccgcacgatagagattcgggatttcggcgctccacagtttcgggttttcgacgttcagacgtagtgtgacgcgatcggcataaccaccacgctcatcgataatttcaccgccgaaaggcgcggtgccgctggcgacctgcgtttcaccctgccataaagaaactgttacccgtaggtagtcacgcaactcgccgcacatctgaacttcagcctccagtacagcgcggctgaaatcatcattaaagcgagtggcaacatggaaatcgctgatttgtgtagtcggtttatgcagcaacgagacgtcacggaaaatgccgctcatccgccacatatcctgatcttccagataactgccgtcactccagcgcagcaccatcaccgcgaggcggttttctccggcgcgtaaaaatgcgctcaggtcaaattcagacggcaaacgactgtcctggccgtaaccgacccagcgcccgttgcaccacagatgaaacgccgagttaacgccatcaaaaataattcgcgtctggccttcctgtagccagctttcatcaacattaaatgtgagcgagtaacaacccgtcggattctccgtgggaacaaacggcggattgaccgtaatgggataggtcacgttggtgtagatgggcgcatcgtaaccgtgcatctgccagtttgaggggacgacgacagtatcggcctcaggaagatcgcactccagccagctttccggcaccgcttctggtgccggaaaccaggcaaagcgccattcgccattcaggctgcgcaactgttgggaagggcgatcggtgcgggcctcttcgctattacgccagctggcgaaagggggatgtgctgcaaggcgattaagttgggtaacgccagggttttcccagtcacgacgttgtaaaacgacggccagtgaatccgtaatcatggtcatagctgtttcctgtgtgaaattgttatccgctcacaattccacacaacatacgagccggaagcataaagtgtaaagcctggggtgcctaatgagtgagctaactcacattaattgcgttgcgctcactgcccgctttccagtcgggaaacctgtcgtgccagctgcattaatgaatcggccaacgcgcggggagaggcggtttgcgtattgggcgccagggtggtttttcttttcaccagtgagacgggcaacagctgattgcccttcaccgcctggccctgagagagttgcagcaagcggtccacgctggtttgccccagcaggcgaaaatcctgtttgatggtggttaacggcgggatataacatgagctgtcttcggtatcgtcgtatcccactaccgagatatccgcaccaacgcgcagcccggactcggtaatggcgcgcattgcgcccagcgccatctgatcgttggcaaccagcatcgcagtgggaacgatgccctcattcagcatttgcatggtttgttgaaaaccggacatggcactccagtcgccttcccgttccgctatcggctgaatttgattgcgagtgagatatttatgccagccagccagacgcagacgcgccgagacagaacttaatgggcccgctaacagcgcgatttgctggtgacccaatgcgaccagatgctccacgcccagtcgcgtaccgtcttcatgggagaaaataatactgttgatgggtgtctggtcagagacatcaagaaataacgccggaacattagtgcaggcagcttccacagcaatggcatcctggtcatccagcggatagttaatgatcagcccactgacgcgttgcgcgagaagattgtgcaccgccgctttacaggcttcgacgccgcttcgttctaccatcgacaccaccacgctggcacccagttgatcggcgcgagatttaatcgccgcgacaatttgcgacggcgcgtgcagggccagactggaggtggcaacgccaatcagcaacgactgtttgcccgccagttgttgtgccacgcggttgggaatgtaattcagctccgccatcgccgcttccactttttcccgcgttttcgcagaaacgtggctggcctggttcaccacgcgggaaacggtctgataagagacaccggcatactctgcgacatcgtataacgttactggtttcacattcaccaccctgaattgactctcttccgggcgctatcatgccataccgcgaaaggttttgcgccattcgatggtgtcaacgtaaatgcatgccgcttcgccttccggccaccagaatagcctgcgattcaaccccttcttcgatctgttttgctacccgttgtagcgccggaagatgcttttccgctgcctgttcaatggtcattgcgctcgccatatacaccagattcagacagccaatcacccgttgttcactgcgcagcggtacggcgatagaggcgatcttctcctcctgatcccagccgcggtagttctgtccgtaaccctctttgcgcgcgcgcgccagaatggcttccagctttaacggttcccgtgccagttgatagtcatcaccggggcgggaggctaacatttcgattaattccttgcggtcttgttccgggcaaaaggccagccaggtcaggcccgaggcggttttcagaagcggcaaacgtcgcccgaccattgcccggtgaaaggataagcggctgaaacggtgagtggtttcgcgtaccaccattgcatcaacatccagcgtggacacatctgtcggccataccacttcgcgcaacagatcgcccagcagtggggccgccagtgcagaaatccactgttcgtcacgaaatccttcgcttaattgccgcactttgatggtcagtcgaaaactatcatcggaggggctacggcggacatatccctcttcctgcagcgtctccagcagtcgccgcacagtggtgcgatgcaggccgctgagttccgccagcagcccgacgctggcaccgccatcaagtttatttaacatatttaataacattagaccgcgggttaagccgcgcacggttttgtattccgtctgctcattgttctgcatattaattgacatttctatagttaaaacaacgtggtgcacctggtgcacattcgggcatgttttgattgtagccgaaaacacccttcctatactgagcgcacaataaaaaatcatttacatgtttttaacaaaataagttgcgctgtactgtgcgcgcaacgacattttgtccgagtcgtgaggtactgaaatggcaatacaacaccctgacatccagcctgctgttaaccatagcgttcaggtggcgatcgctggtgccggcccggttgggctgatgatggcgaactatctcggccagatgggcattgacgtgctggtggtggagaaactcgataagttgatcgactacccgcgtgcgattggtattgatgacgaggcgctgcgcaccatgcagtcggtcggcctggtcgatgatgttctgccgcacactacgccgtggcacgcgatgcgttttctcaccccgaaaggccgctgttttgctgatattcagccaatgaccgatgaatttggctggccgcgccgtaacgcctttattcagccgcaggtcgatgcggtgatgctggaaggggtgtcgcgttttccgaatgtgcgctgcttgttttcccgcgagctggaggccttcagtcagcaagatgacgaagtgaccttgcacctgaaaacggcagaagggcagcgggaaatagtcaaagcccagtggctggtagcctgtgacggtggagcaagttttgtccgtcgcactctgaatgtgccgtttgaaggtaaaactgcgccaaatcagtggattgtggtagatatcgccaacgatccgttaagtacgccgcatatctatttgtgttgcgatccggtgcgcccgtatgtttctgccgcgctgcctcatgcggtacgtcgctttgaatttatggtgatgccgggagaaaccgaagagcagctgcgtgagccgcaaaatatgcgcaagctgttaagcaaagtgctgcctaatccggacaatgttgaattgattcgccagcgtgtctacacccacaacgcgcgactggcgcaacgtttccgtattgatcgcgtactgctggcgggcgatgccgcgcacatcatgccggtatggcaggggcagggctataacagtggtatgcgcgacgcctttaacctcgcatggaaactggcgttggttatccaggggaaagcccgcgatgcgctgctcgatacctatcaacaagaacgtcgcgatcacgccaaagcgatgattgacctgtccgtgacggcgggcaacgtgctggctccgccgaaacgctggcagggtacgttacgtgacggcgtttcctggctgttgaattatctgccgccagtaaaacgctacttcctcgaaatgcgcttcaagccgatgccgcaatattacggcggtgcgctgatgcgtgagggcgaagcgaagcactctccggtcggcaagatgtttattcagccgaaagtcacgctggaaaacggcgacgtgacgctgctcgataacgcgatcggcgcgaacttcgcggtaattggctggggatgcaatccactgtgggggatgagcgacgagcaaatccagcagtggcgcgcgttgggcacacgcttcattcaggtggtgccggaagtgcaaattcataccgcacaggataaccacgacggcgtactacgcgtgggcgatacgcaaggtcgcctgcgtagctggttcgcgcaacacaatgcttcgctggtggtgatgcgcccggatcgctttgttgccgccaccgccattccgcaaaccctgggcaagaccctgaataaactggcgtcggtgatgacgctgacccgccctgatgccgacgtttctgtcgaaaaggtagcctgatatgcacgcttatcttcactgtctttcccactcgccgctggtggggtatgtcgacccggcgcaagaggtgctcgatgaggtcaatggcgtgattgccagcgcccgcgagcgtattgcggcattctcccctgaactggtggtgctgtttgcgccagatcactacaacggctttttctatgacgtgatgccaccgttctgtttaggcgttggagcgacggcaattggtgatttcggcagtgcggcaggagagctgcccgtgcctgtggagctggcggaggcctgtgcgcatgccgtcatgaagagcgggatcgatcttgccgtttcttactgtatgcaggtggaccacgggttcgcccagccgctggagttcctgctcggtgggctggataaggtgccagttctgcctgtgttcatcaacggtgtcgccacgccgctgcccggtttccagcgtacccgcatgttgggtgaagccattggacgtttcaccagcactctcaataaacgcgtgctgttcctgggttccggtgggctttcccatcagccgccggtgcccgaactggcgaaagccgatgcccatatgcgcgaccgtctgttggggagcgggaaagatttacccgccagtgagcgcgaattgcgtcagcaacgggtgattagcgccgctgagaagtttgttgaggatcagagaacgctgcatccgctcaacccgatttgggataaccagttcatgactttgctggagcagggacgcatacaggaactggatgccgtcagtaacgaagagctttccgccattgccggaaagtcgacacatgaaatcaaaacctgggtcgccgcttttgccgctatttctgcgtttggcaactggcgtagcgaagggcgttattaccgcccaatcccggagtggattgccggatttggctcgttaagcgccagaacagagaactgaatatgcaggagaagatgatgagttatcagccacaaaccgaagccgccaccagccgttttctgaatgtagaagaagcgggtaaaacgctgcgcatccattttaatgactgcggacaaggcgacgaaaccgttgtcctgctgcatggttccggcccgggtgctactggctgggcgaacttcagccgcaatatcgatccgctggtagaggcgggctatcgggtgatcctgctggattgtccgggttggggcaagagcgattcggtcgttaatagtggttcgcgatcggatcttaatgcacgaatcctgaaaagcgtggtggatcaactggatatcgccaaaatccacctgctgggcaactcgatggggggccatagttctgtggcgttcacccttaaatggccggagcgcgtcggcaaactggtgctgatgggcggcggtacgggcggcatgagtttgtttacgccgatgccaaccgaaggtattaagcgactgaatcagctttatcgtcagccgactatcgaaaacctgaagctgatgatggatatcttcgtttttgataccagcgatttgaccgacgccctgtttgaagcgcgcctgaataatatgctgtcgcgccgcgatcacctggaaaacttcgttaagagcctggaagctaatccgaaacagttcccggattttggcccacgtctggcggaaatcaaagcgcaaaccctgattgtctgggggcgcaacgaccgctttgtgccgatggatgcgggtctgcgtctgctgtccggcattgccggttctgaactgcatatcttccgcgactgtggtcactgggcgcagtgggaacatgccgacgctttcaatcaactggtgctgaatttcctcgcacgcccttaaggaatggtcatgacgaagcatactcttgagcaactggcggcggatttacgccgcgccgcagagcagggcgaagcgattgcaccgctgcgcgatctgattggtatcgataacgctgaagcggcttacgccattcagcacataaatgtgcaacatgacgttgcgcaggggcgtcgcgtggtagggcgtaaagtgggcctgacacatccgaaagtgcaacaacaactgggcgttgatcaaccggattttgggacgttatttgccgacatgtgttatggcgataacgaaatcattcctttttcccgtgttctgcaaccccgcattgaagcggagatcgcactggtgttgaaccgcgatttgcccgcaaccgatatcaccttcgacgaattgtataacgccattgaatgggtacttccggcgctggaagtggtggggagccgcattcgcgactggtcgattcagtttgtcgataccgtggcagataacgcctcctgtggggtgtatgtcatcggcggtccggcgcaacgtccggcggggttagacctgaaaaactgcgccatgaagatgacgcgtaataacgaagaggtttctagcgggcgcggcagcgaatgcctgggacatccgcttaatgcggccgtctggctggcacgcaaaatggccagtctgggtgaaccgctgcgcaccggagatatcattcttaccggggcattaggtccgatggtggcggtgaatgcgggcgatcgttttgaagcccatattgaaggcataggttcagttgctgcgacattttcaagcgcagccccaaaaggaagtctgtcatgagtaagcgtaaagtcgccattatcggttctggcaacattggtaccgatctgatgattaaaattttgcgtcacggtcagcatctggagatggcggtgatggttggcattgatcctcagtccgacggtctggcgcgcgccagacgtatgggcgtcgccaccacccatgaaggggtgatcggactgatgaacatgcctgaatttgctgatatcgacattgtatttgatgcgaccagcgccggtgctcatgtgaaaaacgatgccgctttacgcgaagcgaaaccggatattcgcttaattgacctgacgcctgctgccatcggcccttactgcgtgccggtggttaacctcgaggcgaacgtcgatcaactgaacgtcaacatggtcacctgcggcggccaggccaccattccaatggtggcggcagtttcacgcgtggcgcgtgttcattacgccgaaattatcgcttctatcgccagtaaatctgccggacctggcacgcgtgccaatatcgatgaatttacggaaaccacttcccgagccattgaagtggtgggcggcgcggcaaaagggaaggcgattattgtgcttaacccagcagagccaccgttgatgatgcgtgacacggtgtatgtattgagcgacgaagcttcacaagatgatatcgaagcctcaatcaatgaaatggctgaggcggtgcaggcttacgtaccgggttatcgcctgaaacagcgcgtgcagtttgaagttatcccgcaggataaaccggtcaatttaccgggcgtggggcaattctccggactgaaaacagcggtctggctggaagtcgaaggcgcagcgcattatctgcctgcctatgcgggcaacctcgacattatgacttccagtgcgctggcgacagcggaaaaaatggcccagtcactggcgcgcaaggcaggagaagcggcatgaacggtaaaaaactttatatctcggacgtcacattgcgtgacggtatgcacgccattcgtcatcagtattcgctggaaaacgttcgccagattgccaaagcactggacgatgcccgcgtggattcgattgaagtggcccacggcgacggtttgcaaggttccagctttaactatggtttcggcgcacatagcgaccttgaatggattgaagcggcggcggatgtggtgaagcacgccaaaatcgcgacgttgttgctgccaggaatcggcactattcacgatctgaaaaatgcctggcaggctggcgcgcgggtggttcgtgtggcaacgcactgtaccgaagctgatgtttccgcccagcatattcagtatgcccgcgagctcggaatggacaccgttggttttctgatgatgagccatatgaccacgccggagaatctcgccaagcaggcaaagctgatggaaggctacggtgcgacctgtatttatgtggtggattctggcggtgcgatgaacatgagcgatatccgtgaccgtttccgcgccctgaaagcagagctgaaaccagaaacgcaaactggcatgcacgctcaccataacctgagtcttggcgtggcgaactctatcgcggcggtggaagagggctgcgaccgaatcgacgccagcctcgcgggaatgggcgcgggcgcaggtaacgcaccgctggaagtgtttattgccgccgcggataaactgggctggcagcatgggaccgatctctatgcgttaatggatgccgccgacgacctggtgcgtccgttgcaggatcgaccggtacgagtcgatcgcgaaacgctggcgctgggatacgctggtgtttactcgagcttcctgcgtcactgtgaaacggcggcggcgcgttatggcttaagtgcggtggatattctcgttgagctgggcaaacgccggatggttggcggccaggaggatatgatcgttgacgtggcgctggatctgcgcaacaacaaataatgatgactgccgagaacgtgcattttgtatgcccatcccagcacgactgccggatgcggcgtgaacgccttatccggcctacggatggcgtgagaatttgtaggtctgataagacgcgttagcgtcgcatcaggcatctgcgcacgactgccggatgcggcgtgaacgccttatccggcctacggatggcgcgggaatttgtaggcctgataagacgcgttagcgtcgcatcaggcatctgcgcacgactgccggatgcggcgtgaacgccttatccggcctacgggtggcgcgagaatttgtaggcctgataagacgcgttagcgtcgcatcaggcatctgcgcacgactgccggatgcggcgtaaacgccttatccggcctacggatggcgcgggaatttgtaggcctgataagacgcgttagcgtcgcatcaggcatctgcacacgactgccggatgcgataaacgtcttgtccggcctacatttcgcccgtaggcagtcattaaatagttctgattacgcggctggcaatgtatcagtcgcgattcacctgcactcgcaacgaggttcatcttatgtcgactcgtaccccttcatcatcttcatcccgcctgatgctgaccatcgggctttgttttttggtcgctctgatggaagggctggatcttcaggcggctggcattgcggcgggtggcatcgcccaggctttcgcactcgataaaatgcaaatgggctggatatttagcgccggaatactcggtttgctacccggcgcgttggttggcggaatgctggcggaccgttatggtcgcaagcgcattttgattggctcagttgcgctgtttggtttgttctcactggcaacggcgattgcctgggatttcccctcactggtctttgcgcggctgatgaccggtgtcgggctgggggcggcgttgccgaatcttatcgccctgacgtctgaagccgcgggtccacgttttcgtgggacggcagtgagcctgatgtattgcggtgttcccattggcgcggcgctggcggcgacactgggtttcgcgggggcaaacttagcatggcaaacggtgttttgggtaggtggtgtggtgccgttgattctggtgccgctattaatgcgctggctgccggagtcggcggttttcgctggcgaaaaacagtctgcgccaccactgcgtgccttatttgcgccagaaacggcaaccgcgacgctgctgctgtggttgtgttatttcttcactctgctggtggtctacatgttgatcaactggctaccgctacttttggtggagcaaggattccagccatcgcaggcggcaggggtgatgtttgccctgcaaatgggggcggcaagcgggacgttaatgttgggcgcattgatggataagctgcgtccagtaaccatgtcgctactgatttatagcggcatgttagcttcgctgctggcgcttggaacggtgtcgtcatttaacggtatgttgctggcgggatttgtcgcggggttgtttgcgacaggtgggcaaagcgttttgtatgccctggcaccgttgttttacagttcgcagatccgcgcaacaggtgtgggaacagccgtggcggtagggcgtctgggggctatgagcggtccgttactggccgggaaaatgctggcattaggcactggcacggtcggcgtaatggccgcttctgcaccgggtattcttgttgctgggttggcggtgtttattttgatgagccggagatcacgaatacagccgtgcgccgatgcctgacgtgccttattaggcaggggcgaaagggacttcaccccaatacacctacggcgtttacaggtatactcgctaaaaattattcagcgggtttggaaacaaagatggcaaaacttaccttacaagagcagttgctcaaagcaggattagtcaccagcaaaaaagcggcgaaggtggagagaacggcgaaaaaatcgcgcgttcaggcgcgtgaagctcgggcggcggtagaagaaaataaaaaggcacagcttgagcgtgataaacagcttagcgaacagcaaaaacaagcggcgttggcgaaagaatataaagctcaggtgaagcagcttattgaaatgaaccgaatcaccattgccaatggcgatattggttttaacttcactgacggcaatctgattaagaagatttttgtcgataagctcacacaggcgcagttgattaatggtcgtctggcgattgcccgcttgttggtcgataacaatagcgaaggtgaatacgccattattcccgccagcgttgccgataaaattgctcagcgcgatgccagcagtatagtgttgcacagcgcgctcagcgccgaagagcaggatgaagacgacccgtatgccgacttcaaagtgcctgatgatttgatgtggtaaacatagataagtcgtgcgcagatgcctgatgcgacgctatgcgcgtcttatcaggcctacggtttatgggcgaagtgtagaccggataaggcgttcacgccgcatccggcagtcgtgcgccatgcctgatgcgacgctttgcgcgtcttatcaggcctacggcttacgggcgaagtgtaggccggataaggcgttcacgccgcatccggcagtcgtgctattatcaacgcatattcagtttattggcgtggtaggcaatatgctcgccaataaaactggagacaaaataatagctgtgatcataaccctcgtgataacggattaacgtcttgatattcatctcctggcagatcttttcaagatttggagtccgcagctgttctgcgtaaaaatcatcactcaacccctgatcaaccatgatttccgcaacgcgttgaccttgtgaaataagactcaccgggtcgtaatccaaccaggcatctttattttcagcaagatatgcagcaaaggcttgctgtccccacggcacttgcgatggggagacaatgggcgaaaacgccgagacgctgacatattcatctgggttacgtaacgccagcaccagcgcgcccagcccgcccatagaatgaccagagatagactttttggccgttgccggaaaatgatgcatcactaaatccggcagctcgttgcggatatagtcatacattttgtaatgttcattccacggcgcttgcgtcgcgttcaggtaaaacccggcaccttgcccgagatcgtaacggtcagcatctgcgacatgactgcctcgcggactggtgtccggcgcaacaacaataatgttgtgctcagccgcgtaacgctgcatccccgatttagtaatgaaattctgctcgttgcaggtcaggcctgaaagccagtacagcaccggcaatttttcattcgcggcttttggtgggagatagacgccgacattcatttcacatttcagtgattgggaataatgccgatacatattttgccagccgccaaagctgacatgtttttcaatgagttccatcagtcattatctcagggttaatcccccggacggctgcccggggagagtattaagaacccccgcctgaagtggacggggtaaacctgcgggaaatcagtaacgaattacggttcgaatggatttgccttcatgcatcaggtcgaaggcgtcattaatttcatccaggctcatggtatgcgtgacaaacggttccagatcgatatcacctttcatcgcatcttcaaccatgcccggtaactgggaacgacctttcacgccgccaaacgcggaacctttccatacgcgaccagtgaccaactggaatggacgggtggagatttcctgaccggcaaccgcgaccccgatgatcaccgactgaccccagccgcggtgcgcactttccagcgccgcacgcatcacgttgacgttaccgatgcattcaaaggtatggtcgataccccatttgttgatatccaacaggacatcttttatcggtttgtcgtagtcattcgggttaatgcagtcggtagcaccgaagcgacgcgccagatcgaatttcttcgggttggtatcgatagcgataatccgacccgctttcgcctgacgcgcgccctgaaccactgccagaccaatcgcgccaagaccaaacacggcaacagaatcacctggctggactttagctgtgttgtgtaccgcgccaataccggtggtcacgccacagcccagcaggcagacgtgttcatggtttgcttctggattaatttttgccagagacacttccgcgactacggtgtattcactgaatgtagagcaccccatgtagtgataaagcggctgcccgttgtaagaaaaacgggtggtgccgtctggcatcaggcctttaccctgggtttcgcgaaccgcaacacagaggttagttttgccagaacgacagaactcacactcgccgcactccgcggtgtaaagcgggatcacatggtcgccaggtttgacgctggttacgccttcaccgacttcaaccacaacgccggccccttcgtgaccgagaaccaccgggaatacaccttccgggtcatcgccggagagggtaaatgcgtcggtatggcaaacgccggtatgggtgactttaattagcacttcaccttttttcggtggtgcaacgtcaatttcaacgatttccagcggtttaccgggagcaaatgcaacggcagcacgtgatttcatctctcgctcttcctcaatatggtaatagattcagctatttaagataggcacgaaccagttcaatagtgtcgtcaacggattggctgacttcgcggctgtagcagtcatttcggtcaaacgtttcccggatatggctttcaagcacttctgccatcagcccattagccgcgccccgaacggcagcgatctgttggagtatggcacggcattcggcatcaccctccagcgaccgttccagagcatcaatctgcccccgaatacgacgaactcgagtaaggacctttttcttctcttccggagtactgggcatttcgcacctcatcatctgcatgcaatatactataggggggtattctatatgtcaatgcatacccccctatagtatataacactggagaataaaatttatccggtgaatgtggtcggaaaacaaagaggaaaggggggggggctaatcggcagggaaggccgccccggatagcgggcggcagaaggaatcagaatttccaggtcagacgggctgcaagttgcagaccgttaaaatcatcggttggggtgtcgtaccacactttacctgccgtcagcccgagattaagttgctcagtcagcggttgaatacgttgcagactgacgctcttcatgctgccgtagcgtgtttctggcgtccagtcataggtgtaagcacctgttccgcggcttagccatagttgcgtataaccagtgccgcgcgggtcattcagacgcacggaaatcatattgctataactaccacctgcatcgctggagtcataatgggtatagcggtagctggtgatcaccgggccagtatagagtgatacgccgccttgccaggcatcgacttcgacatcatcgtaatatttagtgtagcgataaccggtcgtgaaaagcgtttttggtaacagggccaggttaatatcctgacgaaaatcctggcgggcaaagaccggcgtattatccgcaaaggcaatacccgttcgggttgtcagccagttattccatttataccagaccgcaccctgaccgcgagtggcattgaaatgttcagtttcataatcacgacgcccctgggaaagattaaaaagcagcgttgcgttttcaactttcgccaccagttcagcatacgctaaattacggttgccatgatcgccagaataatcggtaaaatcgtagcccgcggtaatggaagttaacccggcataagcgggcaatgcgctaaaaatggccgccgctaataacgtccgttttatcattttaatctcctgtacggataagttcttgtcggagtgaataagttccggtaggtaaattacgttctacaatcacgcgcgggccaagttgcgtgttcggggaaataattcgcccaggcaaaataataacttgtacgccaaggcgtgaacgctgcccgatataacaacctaatttatcgcatccggtagcgataattccctctggagttcgaacagacacgggctgttcatccagacgatgattactggtacgtacttgtgcgcctaaatatgcctggtttgcaactaccgagtcggcaataaaacattgcggaccaatcgttgcttccgcttcaataaccgcatttttaatctcggtggcaaaaccaatttttacgccattgctgattattgtgccaggacgaataaacgcataattactagactggccccctgaatctccagacaaccaatatcacttaaataagtgatagtcttaatactagtttttagactagtcattggagaacagatgattgatgtcttagggccggagaaacgcagacggcgtaccacacaggaaaagatcgcaattgttcagcagagctttgaaccggggatgacggtctccctcgttgcccggcaacatggtgtagcagccagccagttatttctctggcgtaagcaataccaggaaggaagtcttactgctgtcgccgccggagaacaggttgttcctgcctctgaacttgctgccgccatgaagcagattaaagaactccagcgcctgctcggcaagaaaacgatggaaaatgaactcctcaaagaagccgttgaatatggacgggcaaaaaagtggatagcgcacgcgcccttattgcccggggatggggagtaagcttagtcagccgttgtctccgggtgtcgcgtgcgcagttgcacgtcattctcagacgaaccgatgactggatggatggccgccgcagtcgtcacactgatgatacggatgtgcttctccgtatacaccatgttatcggagagctgccaacgtatggttatcgtcgggtatgggcgctgcttcgcagacaggcagaacttgatggtatgcctgcgatcaatgccaaacgtgtttaccggatcatgcgccagaatgcgctgttgcttgagcgaaaacctgctgtaccgccatcgaaacgggcacatacaggcagagtggccgtgaaagaaagcaatcagcgatggtgctctgacgggttcgagttctgctgtgataacggagagagactgcgtgtcacgttcgcgctggactgctgtgatcgtgaggcactgcactgggcggtcactaccggcggcttcaacagtgaaacagtacaggacgtcatgctgggagcggtggaacgccgcttcggcaacgatcttccgtcgtctccagtggagtggctgacggataatggttcatgctaccgggctaatgaaacacgccagttcgcccggatgttgggacttgaaccgaagaacacggcggtgcggagtccggagagtaacggaatagcagagagcttcgtgaaaacgataaagcgtgactacatcagtatcatgcccaaaccagacgggttaacggcagcaaagaaccttgcagaggcgttcgagcattataacgaatggcatccgcatagtgcgctgggttatcgctcgccacgggaatatctgcggcagcgggcttgtaatgggttaagtgataacagatgtctggaaatataggggcaaatccaattacctatcaggcagtttgcgccaatcactaccggaccctgaataacggcaccatgacaaatacgggtattcgcgccgataacaacttcacctgcagtttcatcaataattacctggtctgcaatctgaatatttttctctttaacattaagcttcagatagtttttcagttcctgtgacagaaggttgggaataagcggttgacgcttccaccagtgcggaatagcgggtgggtttgtcgcgctgaggttcgcgtccagtaaaaaaggcaataagtccataaataatccagatggcataagctaataatacatacacaacggaaagcggcgctaaaggcaccaacaaccagcaacgatgaaaccaggcgctaaaagcaccaataacacaaactacgccgacccagataagcggaaacattgccaacaccactccatgcggcccggtggtgatgaattcattaaaccaggtagtgagataaatcccaacgccataaagcacaaccaacagcataggaaatatactgaagataccgaagcggctaaataaaagtcttttatgcaggcgcatacagaccgcgtatcccacaatccaacgccgccagcgacgccactcctcacgcgggctgttgcattcctgtgggtatacgatgcagcgattcgcctgccgaatacggtagccgtttgccaccaatgtccaggtgagatcaaggtcttcgactttagtacgatccgagaaaccgaacttacgcaatacatcagtacggaacatcccgcaggcaccgctgataataaacggtgcgccacccaggagctgctgtagcgtgcgcttcataacaatcatcggcaactttacggtcgcgcggatgtgcggtaacagacccgcgcctttcaacgcagtagagggaatgccgcctacggcatcggcaccgcgctcaatttctgccagcatatagcccattccgtcttgatcgggcggaacataggtgtcggcatcacttaaaaaaacctggtcgcaggtggcgtaattgaggccattcatcagcgcaccacctttaccggtatttttttgcgtgacggcaacaaagcggtcgccccatttgcgtttgacttccgccatgaccgcttcggtattgtccgtggagccgtcgttaacgcaaattacccggcaaaaataagggttacgcagtagattatccagtgactgcgccagacacgggccttcgttatacgcaggtataatggcgtcaatacagcctttcttttgactgggtttacgtcttagcgtacttaaaaaccatagcaacattgctatggacatacagataaatatccaggttttcatgcaatttgctcaaagaatcattttatgaattacaaagccttcacccagatcgctattgacctgttgtccgcgaaattgtgcaactgcacgcaggcgatcatgacgcatataatcgcgtcgttcctagcttttatgtttttttaatgcagcaagtttgactgtgaaatattcttctttaacggattcaaaaacctgaggcataaatgaaagccaggtacttggggtttcgtagccgagaatttgcggaatagttcggcaggcaaccattgaagcttgataaacagcaagatgatcctgatggcggtcggcatcatgcatggtatatacccgcatgatttcaacatcagaaggaatttgatttttaatgatgtcttccagggcggaaatcatatcattgagctgtaaatgagcgcgggtgtcagcaaaattaagatgaatagtttggtggcaccctaatatctttagggcgttgcgcgattcttcatggcgatcgattattccatctgtgccagagttgccggtagtcatcaccacggctgcgatataaattcctttttgcgcaagacgagcaagcgatgcgccacagcctaattctatatcgtcaggatgtgcgccaatagcaaggataccctttcttttatttgccgaagaaaggagggctgaatctaaaaccttatccacttaatgacactccattttatttattatactacaagcacaacgatgcactcagagacgtaatctctggcgcagccagatgttaatttataaatgttaaatgttgctaataactgaaaagcaagggctttcagacccgtgggttcgactgggtaatgtttctatgcaattcatatgttaagtgtttgtatgtttggtatgtatagttattttgttttatacattgtatttagatgtgatttagtttgtcaattaattgcatttaaaaaatatgttctgtgaacaagcattgtttatatacattatgtgaatgtaatatgcgagtgattgagaatgatacagtgatatatacaatgcgaatataatagttttattatatgtattgatattgatagaaataatgaagtaataaatctcgtaatgtggttgtttatgcatcactaaaatgaagtgtagtaattttcccaattgttagaacggagtaattgcatatttaatctttccttagccgtttttttgctaagaataaaatcatctgtgcgataacgactaattcttttaatgaatgtttttattcctgaatactgctcccataacaagacaggggagcagacaatcatggcaatttcatcgcgtaacacacttcttgccgcactggcattcatcgcttttcaggcacaggcggtgaacgtcaccgtggcgtatcaaacctcagccgaaccggcgaaagtggctcaggccgacaacacctttgctaaagaaagcggagcaaccgtggactggcgtaagtttgacagcggagccagcatcgtgcgggcgctggcttcaggcgacgtgcaaatcggcaacctcggttccagcccgttagcggttgcagccagccaacaggtgccgattgaagtcttcttgctggcgtcaaaactgggtaactccgaagcgctggtggtaaagaaaactatcagcaaaccggaagatctgattggcaaacgcatcgccgtaccgtttatctccaccacccactacagcctgctggcggcactgaaacactggggcattaaacccgggcaagtggagattgtgaacctgcagccgcccgcgattatcgctgcctggcagcggggagatattgatggtgcttatgtctgggcaccggcggttaacgccctggaaaaagacggcaaggtgttgaccgattctgaacaggtcgggcagtggggcgcgccaacgctggacgtctgggtggtgcgcaaagattttgccgagaaacatcctgaggtcgtgaaagcgttcgctaaaagcgccatcgatgctcagcaaccgtacattgctaacccagacgtgtggctgaaacagccggaaaacatcagcaaactggcgcgtttaagcggcgtgcctgaaggtgacgttccggggctggtgaaggggaatacctatctgacgccgcagcaacaaacggcagaactgaccggaccggtgaacaaagcgatcatcgacaccgcgcagtttttgaaagagcagggcaaggtcccggctgtagcgaatgattacagccagtacgttacctcgcgcttcgtgcaataaaaggaggcgcagatgctgcaaatctctcatctttacgccgattatggcggcaaaccggcactggaagatatcaacctgacgctggaaagcggcgagctactggtggtgctggggccgtccggctgcggtaaaaccaccctgctgaatctgattgccggttttgtgccttatcagcatggcagcattcaactggcgggtaagcgtattgagggaccgggagcagagcgtggcgtagtttttcagaatgaagggctactaccgtggcgcaatgtacaggacaacgtggcgttcggcctgcaattggcaggtatagagaaaatgcagcgactggaaatcgcgcaccagatgctgaaaaaagtggggctggaaggcgcagaaaaacgctacatctggcagctttccggtggtcaacgtcagcgggtggggattgctcgtgcgctggcggcgaatccccagctgttattactcgacgaaccgtttggtgcgctggacgccttcacccgcgaccagatgcaaaccctgctgctgaaactctggcaggagacgggcaagcaggtgctgttgattacccacgatatagaagaagcggtgtttatggcgactgaactggttctgctttcatccggccctggccgtgtgctggagcggctgccgctcaactttgctcgccgctttgttgcgggagagtcgagccgcagcatcaagtccgatccacaattcatcgccatgcgcgaatatgttttaagccgcgtatttgagcaacgggaggcgttctcatgagtgtgctcattaatgaaaaactgcattcgcggcggctgaaatggcgctggccgctctcgcgtcaggtgaccttaagcattggcacgttagcggttttactcaccgtatggtggacggtggcgacgctgcaactgattagcccgctatttttgccgccgccgcaacaggtactggaaaaactactcaccattgccggaccgcaaggctttatggacgccacgctgtggcagcatctggcagccagtctgacgcgcattatgctggcgctatttgcagcggtgttgttcggtattccggtcgggatcgcgatgggacttagccctacggtacgcggcattctggatccgataatcgagctttatcgtccggtgccgccgctggcttatttgccgctgatggtgatctggtttggtattggtgaaacctcgaagatcttactgatctatttagcgatttttgcaccggtggcgatgtcggcgctggcgggggtgaaaagcgtgcagcaggttcgcattcgtgccgcccagtcgctgggtgccagccgtgcgcaggtgctgtggtttgtcattttgcccggtgcgctgccggaaatcctcaccggattacgtattggtctgggggtgggctggtctacgctggtggcggcggagctgattgccgcgacgcgcggtttaggatttatggttcagtcagcgggtgaatttctcgcaactgacgtggtgctggcggggatcgcggtgattgcgattatcgcctttcttttagaactgggtctgcgcgcgttacagcgccgcctgacgccctggcatggagaagtacaatgagtgaacgtctgagcattaccccgctggggccgtatatcggcgcacaaatttcgggtgccgacctgacgcgcccgttaagcgataatcagtttgaacagctttaccatgcggtgctgcgccatcaggtggtgtttctacgcgatcaagctattacgccgcagcagcaacgcgcgctggcccagcgttttggcgaattgcatattcaccctgtttacccgcatgccgaaggggttgacgagatcatcgtgctggatacccataacgataatccgccagataacgacaactggcataccgatgtgacatttattgaaacgccacccgcaggggcgattctggcagctaaagagttaccttcgaccggcggtgatacgctctggaccagcggtattgcggcctatgaggcgctctctgttcccttccgccagctgctgagtgggctgcgtgcggagcatgatttccgtaaatcgttcccggaatacaaataccgcaaaaccgaggaggaacatcaacgctggcgcgaggcggtcgcgaaaaacccgccgttgctacatccggtggtgcgaacgcatccggtgagcggtaaacaggcgctgtttgtgaatgaaggctttactacgcgaattgttgatgtgagcgagaaagagagcgaagccttgttaagttttttgtttgcccatatcaccaaaccggagtttcaggtgcgctggcgctggcaaccaaatgatattgcgatttgggataaccgcgtgacccagcactatgccaatgccgattacctgccacagcgacggataatgcatcgggcgacgatccttggggataaaccgttttatcgggcggggtaatacgagagtggacggtcccctcgcccccttggggagagggttagggtgagggggcgttcaccgtactttcaacaggttaactccccctttctgagaggaaacaaaattaacgcagaatcttcttctcagccaaatccagcgcaaagtagctgaaaatcagatccgcacccgcacgcttaatcgaacctaagctttcgagcacgactttctcttcatctatagcacccgccagcgcggcgaacttaatcatcgcatactcaccgctcacctgatacgcgccaatcggcaattcagtacgttcacgcagctcacgcacgatgtcgaggtacgctccagcaggtttaaccatcaggcagtctgcgccctgggcttcatccagcagtgattcacgaatcgcctcacgacggttcattgggttcatctgatagcttttgcggtcgccttttaatgcgcttccggcagcttcacggaacgggccataaaaggaggaggcgaacttggtcgaatacgacataatcgccgtatctttaaatcccgcagcgtccagcgcctgacgaatcgcctgtacctggccgtccatcgcggcggaaggggcgatgaagtctgcacctgcagcagctgcaaccacggcttgcttgcctaaattttccagagtcgcgtcgttgtcgacgccatgctcgcacagcacaccgcagtgaccgtgagaagtgtattcacagaagcaggtgtctgacataacgatcatttctggcacggtctgcttgcagatgcgcgacatacgcgccaccagtccatcttcccgccaggcatcgctgccggtttcatcggtatggtgagagatgccaaaagtcatcacggaacgaataccggcgttggcgatgcgttcaatttcgcgtgccagatgtttctctggaatgcgcatcacgcctggcatggcttcaacggctttgtagtcgtcaatttcttcttcaacaaagatcggcaacaccaggtcgttaaggctaagtgttgtctcttcaaacatagcgcgcagcgcaggagatttgcgcaggcgacgagggcgttggattaagtctgtcatggtctgcctgatgtttgtggaatcgaggggcatagtatacctgaagcagggtagggatgttttacgaaagttgtcgcgatgttgacaagaagagaatggaagagaggccaggacatctttttaatagaaacagcaataattttatattcactgaaaatatttttaatctttatttatagctgttggttattattttttggagtttggttgcgctgctataaattgaataattaaaactttgttgcatattcataggatatttatctggtttgtgtttgtgatatttattatgcgtatgcttcaaaaacaaaattatctgcaacatgttgaaatactgtgcttttatgaatttgatgcgtgtttttctccataaattatatatgtccacattcggacttaggggaaagaataattgaaccattcgtctgtaacgcagcataatcgttagcgcgaaacataatatgttttctatgcattgataattgatggatcaacttattacgtccctgaggagggatgacaaatgcactcctggaaaaagaaacttgtagtatcacaattagcattggcttgcactctggctatcacctctcaggctaatgcagcaaactatgatacctggacttatatcgataatcccgttacagcacttgattgggatcatatggataaggcaggcactgtagatggcaactatgtaaactatagtggttttgtctattacaacaacaccaatggtgatttcgatcagtcctttaacggcgataccgttaacggcacgatctcaacctattatttgaaccatgattatgcagacagtactgctaatcagcttgatatcagtaattcagtgattcacggttcgattacttctatgctgcctggcggttattatgatcgttttgatgcagatggtaataatctgggtggatatgatttttacactgatgcggttgttgatacacactggcgtgatggtgatgttttcactttgaacattgctaacactactattgatgatgattatgaagctctttacttcactgattcttataaagatggtgatgtaaccaagcacacaaatgagacatttgatacaagtgaaggcgttgctgttaatcttgatgtagaaagtaacatcaatatttccaataactcccgcgttgcaggtattgcattatctcaaggtaatacttacaacgaaacctacactaccgaatctcatacttgggataacaatatctctgtaaaagattccacagtgacttcgggttcaaattatatcctggatagcaatacttatggcaaaactggtcactttggcaattctgatgaaccgagtgattatgctggcccgggtgatgttgcaatgtcctttactgcttcaggttccgactatgcgatgaagaacaatgtattcctcagcaattcaacgctgatgggtgatgttgcctttaccagcacctggaatagtaattttgatccgaatggtcatgattccaacggtgacggggtgaaagataccaacgggggttggactgatgatagcctcaacgttgatgaactaaatctcactctcgataacggaagcaagtgggttggtcaggcaatttataacgttgctgaaacgtcagcaatgtatgatgttgctacaaacagccttactcctgatgcaacatatgaaaacaatgactggaaacgtgttgttgatgacaaggtcttccagagcggtgtatttaacgtagcgttgaataacggttctgaatgggatactacaggtcgttccatcgttgataccttgacagttaataatggttctcaggttaatgtttcggaatctaaattaacttcagatactatcgatttaactaacggttcttcgctgaacattggtgaagatggctacgttgataccgatcatctgactattaactcctacagtactgttgcgttgaccgaatctactgggtggggggctgattgatcctacccacgtaatatggacacaggcctaagcgaggttcttgttttcaaattgttccggactgaggccgccacaccaactgtgccgccgccaccgattgtaatcacattcgatataattaaacaccgttgcccgcattatttcccggctgataaagtgttctccatggatacattccactttcagcgaatgaaagaagctttccacgcaggcattatcgtagcagcaaccttttgcgctcatacttccacgcagattatgccgcttcagttgcgcctgataatctgctgaacagtactggcctccacggtccgtgtgaacgataacgttccggggcctcttacgccgccacagcgccatctgcagggcatcgcaggccagttgcgccgtcatgcgtggcgacattgaccagccaataacggcacgtgaccacaggtcaatgaccactgccagatacagccagccttcatctgtacgtaagtacgtgatgtctcctgcccacttctggttcgggccactggcgtaaaaatcctgctccaacagattttctgacacaggcaggccgtgtgcgcggtagctgaccgggctgaacttccgggaggcctttgccctcagtccctgacggcgcaggcttgccgccacggtttttacgttaaaggggtaaccctgagcacgcagttcatccgtcaggcgtggggcaccgtaacgctgttttgaccgggtaaaagccgcgaggacaacgctgtcgcagtgttggcggaactgctgacgcgtgcttatccttgtccgccgctgacaccacgtataccagccgctgcgggccacccggagcacgcggcacattgctttgatgctgaactcagcctgatgtttttcaataaagacatacttcatttcaggcgcttcgcgaagtatgtcgcggccttttggaggatagccagctcttcatcccgttctgccagctggcgtttgagacgtgcaatctcggtagacatctccagttcacgttcagaagacgtctgctgattttgctgtttactgcgccagttgtagagttgtgattcatacaggctgagttcacgggctgcggcagtaacaccgatgcgttcagcaagcttcagggcttcactgcgaaattcaggcgaatgctgtttacggggttttttactggttgatactgtttttgtcatgtgagtcacctctgactgagagtttactcacttagccgcgtgtccactattgctgggtaagatcagattacaacctgtacgccaatactatcaccgtaactaacggcggtgtattggatgtgaacgttgatcagttcgatactgaagctttccgtactgacaaactggaactgaccagcggcaacatcgctgaccataacggtaacgtagtatctggtgtgttcgatatccatagcagcgattacgttctgaacgctgatctggtgaacgaccgtacctgggatacttccaagtctaactacggttacggtattgttgctatgaactctgatggtcacctgactatcaacggtaacggcgacgtagacaacggtactgaactggataacagctctgtagacaatgttgttgctgcaaccggtaactacaaagttcgtatcgacaacgcaactggcgctggcgctatcgctgattacaaagataaagaaattatctacgtaaacgacgtcaacagcaacgcgaccttctctgctgctaacaaagctgacctgggtgcatacacctatcaggctgaacagcgcggtaacaccgttgttctgcaacagatggagctgaccgactacgctaacatggcgctgagcatcccgtctgcgaacaccaatatctggaacctggaacaagacaccgttggtactcgtctgaccaactctcgtcatggcctggctgataacggcggcgcatgggtaagctacttcggtggtaacttcaacggcgacaacggcaccatcaactatgatcaggatgttaacggcatcatggtcggtgttgataccaaaattgacggtaacaacgctaagtggatcgtcggtgcggctgcaggcttcgctaaaggtgacatgaatgaccgttctggtcaggtggatcaagacagccagactgcctacatctactcttctgctcacttcgcgaacaacgtctttgttgatggtagcttgagctactctcacttcaacaacgacctgtctgcaaccatgagcaacggtacttacgttgacggtagcaccaactccgacgcttggggcttcggtttgaaagccggttacgacttcaaactgggtgatgctggttacgtgactccttacggcagcgtttctggtctgttccagtctggtgatgactaccagctgagcaacgacatgaaagttgacggtcagtcttacgacagcatgcgttatgaactgggtgtagatgcaggttataccttcacctacagcgaagatcaggctctgactccgtacttcaaactggcttacgtctacgacgactctaacaacgataacgatgtgaacggcgattccatcgataacggtactgaagggtctgcggtacgtgttggtctgggtactcagtttagcttcaccaagaacttcagcgcctataccgatgctaactacctcggtggtggtgacgtagatcaagactggtccgcgaacgtgggtgttaaatatacctggtaatattcttcactccgaagaaatactggtaatttaatctaaataatgcccgtcaaggatttgacgggcattactgcaaaggacgcgcaaatgttatctgtagttaaacctcttcaggaatttggtaagctcgataaatgtttgtccagatacggtacgcgcttcgagtttaataatgaaaagcaagttatattttccagtgatgtcaataacgaagatactttcgttattttagagggagttatctctctgcgtagagaagaaaacgtacttatcggtattacccaggctccttatattatggggctggctgatggtttaatgaaaaacgatataccatacaaattaatatcagaaggaaattgtacgggatatcatctaccagccaaacaaaccattacgcttattgaacaaaatcaactctggcgagacgctttttactggttagcctggcaaaatagaattctggaattacgcgacgtgcagctcattgggcataattcctacgaacaaatccgcgcaacattattatcaatgattgactggaatgaagaattgcgatcacgtattggtgtgatgaattatatccatcaacgtacacgcatatcgcgttctgtcgtcgcagaagttctcgctgctttgcgtaaaggcggctatatcgaaatgaataaaggcaaactggtcgctatcaaccgtttgccttcagagtattaatcaggacgcggggataaccaacggtttattcccgcttagctcggtcaccaggtcattgatgccatcgctcatatttttaaagcgcgtcaacggcgaacgagtgaccaccacaaacgcgccaatattcttctgcgggatcatcgccatataggtaatgaaaccgccaccaccgcctgtcttctgaataatccccggacgaccctctttcggggccatatatacccaacctaaaccaagcgcatccgctttgccggggacatccatgccaatcactttcgtaaactgcgcgcgctgataaatcaacgtctgcatgcgatctgcctggttactgcgctgataaaaatcagatgacaaatactgctgcatccagcgcatcatatcgccaggcgtggaatagacgccgccgctgccaattgccgccagcgtgttattgcacggactggcaccgcgctcagcaaccattaaacggcggcactgatccggtgagggggtgtaggtggtgtctttcatccccaatggacgggtaatctgctcttcaaacaactgggtataaggcttgccggacgcattcgccagtgcatctgccagcaggtcgaacgcaaggttagagtacgccgcctgactgcctggcgcggctttcagcttcgccgtagaaaggtatttccagcgttgctcgcgcgttggccagacaaacaccggacgatgtgccgcgccaccgggctgttcacggggcagggcgctggtatgggttgccagattgaccagcgtaatgggcgtcccattgtaggttggcacgcgtgcgcctggcggagcatatttacttagcggatcgtttaacttcacggtcccctggtcgagcaatttcaccagcatctcactggtcattagcttggtgagggaagcaatacgcacgaccgaatccagctgcgggcgaacgttattaccaggtcgcgtttcgccataactgcgaaagacgcgctggttaccgtcgataacaaccagagccatccccgtggcaccgctgccgtaaaaaatatgatcggcataacgatcgacaatatcagaggcaaactccggttcagtgatcggctgcgccgcatggacggaggtcaatgacgccgcacacagcacggcagaaaaaagcagactacgtttcaacggtggtgtccatagattgaatgaaggtaactgagcgtatttatactactcattgatagattgcaaagggcgaattagtgcaataatagtgttaaaaacgtaacggcgcgtaaacacgatctttttcctgctcaccaatgcctgcatttgtgatcctgcgcgtgttaatccgcttatgtaaacaatctttggtttgtgaaatccgtcgaaacaattcttatggtcaggctggcgaactaagcgccttgctatgggtcacaatgggcggtttcatttggctgacgctttgtagcggtcatgcggttaatacacagcagttgttaaaacgataagaagttagcaggagtgcatatgtttaagtcttttttcccaaagccgggaacgttttttctctcggccttcgtttgggcattgattgccgttatcttctggcaagccggtgggggtgactgggtggcgcgtatcaccggcgcttccgggcagatcccgattagcgccgcgcgtttctggtcgttggatttcctgattttttacgcttactacattgtttgcgtaggactttttgcattgttctggtttatctacagcccgcatcgttggcaatactggtcaatactcggtactgcactgatcatcttcgtcacctggtttttggtggaagtcggggtcgccgtcaacgcctggtatgcgccgttctatgatctgattcaaaccgcgctaagttcgccgcataaagtcaccatcgaacaattttaccgcgaagtgggcgtctttctggggattgcgctgatcgctgtggtgatcagtgtgctgaacaacttctttgtcagtcactacgtgttccgctggcgtacagcgatgaacgaatattacatggcgaactggcaacaactgcgtcatatcgaaggggccgcacagcgtgtgcaggaagacaccatgcgttttgcttcaacgctggagaatatgggcgtcagttttatcaacgccatcatgacgttgatcgccttcctgccggtgctggtaacgctctccgcgcatgtgccggagctgccgattatcgggcacattccgtatggtctggtgattgccgcaatcgtctggtcgctgatggggaccggattgctggcagtggtagggatcaaactgccggggctggagtttaaaaaccagcgtgtagaggctgcctaccgtaaagagctggtttatggtgaagacgatgccacgcgcgcgacgccgcctacggtacgcgagctgtttagcgccgtacggaaaaactatttccgcctctattttcactatatgtatttcaacatcgcccgcattctctatttgcaggtcgataacgttttcggtttgttcttgctgtttccgtcaattgttgccggtacgattacgctcggcctgatgacgcagattaccaacgtttttggtcaggttcgcggtgctttccagtacctgattaactcatggaccacactggttgagttgatgtctatctacaaacgtctgcgcagctttgaacatgagctggatggtgacaaaattcaggaagtaacccataccttgagctaaaaaggagaagtaatgtcgcgcgtcaatcctctatcttcgctgtcattgttggcggttctggttttagcggggtgtagtagtcaggctccgcaaccgttgaaaaagggcgaaaaagcgatagatgtagcgagcgtcgtgcggcagaagatgcctgcgagcgtgaaagaccgcgatgcctgggcgaaagatctcgccaccacctttgaaagtcaggggctggcaccgacgctggaaaacgtctgctcggtgctggcggtggcgcagcaggagtcaaattatcaggcagatccggccgttccgggcttaagcaagatcgcctggcaagagattgaccgtcgtgctgaacggatgcacattcctgcttttctggttcataccgcgctaaaaatcaaatcgccaaacggcaaaagttatagcgaacggttagattcggtgcgtacagaaaagcaattgagcgcgatttttgacgatctgatcaacatggtgccaatggggcagacgctgtttggttcgctcaatccggtgcgcaccggtgggccgatgcaggtcagcattgcttttgccgaacagcataccaaagggtatccgtggaaaatggacggtacagtccgtcaggaagtcttcagtcgccgcggcgggttgtggtttggtacttaccatttactgaattatcccgccagttatagcgcaccgatataccgttttgctgattttaacgctggctggtacgccagccgtaatgccgcgtttcagaacgcggtcagtaaggccagcggcgtgaagctggcactggacggtgatttaattcgttacgacagtaaagaacccgggaaaaccgaactggcaacgcgcaaactggctgcaaaactggggatgagcgacagcgaaattcgccgtcagttagagaaaggtgacagcttctcttttgaggagacggcgctgtacaagaaagtttatcaacttgccgaaacgaaaacgggtaaatcactcccccgcgaaatgttgcctggcattcaactggaaagcccgaaaatcacccgcaacctgactacggcctggtttgcgaagcgcgtagacgaacggcgggcgcgttgtatgaaacagtgatcaaacaggaatgtcaggccagataaggcgtttcaggccgcatctgacaatgtaaaacttactggcggcgatgtcgccagtgcagccatagcgccaccactgcaaaaatgaggcagcctactaaaaacgggatcagcccgaaaatggtgccgacacctaaaccaatttccacccgtgggcgacctgtttcctggacctgcattaaacgctcatagacgccgggcgcatgcactaacaggttcagcaattgcgccccagcccaaaagcaaaacagcacaaacaacgcataggcaatgttgccaggcgttgaagaggcattgcgatattttccgctaaacagcgattttgacagggtgaaatcagccataaaaacctccggaagtcatctgcttctcttctggtgtgataccagcggcttatggcaagtctgacaggtcatttagattgtcaatatcagaatcatggtaaattgatgttgggaatattcccgaagcgtgaatcttcgttgtgagtcacaaaatggcaaccttaagttaaatttattaacaattacgaaaatgttgtctacaccacagacggttgttgcagaatatgcaaggatgttgtttttcgttaacggagctgccatgaatctgcctgtaaaaatccgccgtgactggcactactatgcgttcgccattggccttatattcattcttaatggcgtggtggggttactgggatttgaagcaaaaggttggcagacctatgccgtcggtctggtgacgtgggtgattagtttctggctggcggggttgattattcgtcgtcgcgatgaagaaactgaaaacgcccaataagaatattatcgggcgttaaaatattacattgtggttttcaatgcgttatccgcagcgtgacgctccagcgccagttcaatcaaacgtgtgatcagatcggtgtaacccagaccgctggcttgccacagcttcggatacatactgatattagtgaagccaggcagggtgttgatctcgttgatcaccacttcgttctctggggttaaaaacacgtctacacgcgccatgcctgcgcatcccaacgtttgataagcctgaacggcaatcgcccggatcttatcgttgatttctggcgcaatggctgccggaactaccactttcgcgccatcttcgtcaatgtacttggtgtcgtaggcatagaaatcgctggtgagtacgatctctccacaggtgctggcttgcggattgtcgttgcccagaactgcgcattcgatctcacgacctttgatcccttgctcaacgatcactttatgatcgaactcgaacgccagatcgacggcaattgcgtactgttcttcactggttactttgctgacaccaacagaagagccctgattagccggttttacaaacagtggtaaccccagtttagactccacttcggcaaaactaatgttgtgacgattggcgcgcgtcagggtaataaatggcgcaatgttcagcccggcatcgcgtagcagacgtttggtgacatctttgtccatacaggctgctgaagccagaacatcagaacctacaaacggtaaattggcgacccgcagcattccctgcaaggaaccatcttcgcccagcgtaccgtggacaatcgggaaaatgacatccaccgtcggcaacggctgaccgttttgcgcgtcgataagctgatgctcatgtttacctggcacctgcgcaaggctggtcgccgaagggcgcaacgcaatatgggcaggatcgtctgcatttagcagataattgctggcatcgctgacgtgccattgcccttgtttatcaatgcccagcagcacaacgtcgaagcgacttttatcaatggcatcgacaatgttttttgccgattgcagagacacttcatgttccgctgatttaccaccaaaaacgattcctacccgcagtttttccatcttaaaaacctatcccgtctaacacaaagtgcatacattaccacgacaaaacgggggattcgcggccttctgaaagattgttgcaatcttctgctgacaaagcgtgcaacgtactggtgaagaaagtgcgttatctcaaagatgtgcgcaagatcacaaaaatgatgaacgggaagctaatttattcctggcttaaatggccatgcggtgagtttttttctcttaattataagttaacgaagagaatatatttcataacttttatttataataaaggttgataattaaaagcctatattttgtgtgggtaattatttaaataagagaaacgtttcgctggtaatcaaacaaaaaatatttgcgcaaagtatttcctttgtcataaaaataatacttccagacactatgaagttgtgaaacataatgttaacttctccatactttggataaggaaatacagacatgaaaaatctcattgctgagttgttatttaagcttgcccaaaaagaagaagagtcgaaagaactgtgtgcgcaggtagaagctttggagattatcgtcactgcaatgcttcgcaatatggcgcaaaatgaccaacagcggttgattgatcaggtagagggggcgctgtacgaggtaaagcccgatgccagcattcctgacgacgatacggagctgctgcgcgattacgtaaagaagttattgaagcatcctcgtcagtaaaaagttaatcttttcaacagctgtcataaagttgtcacggccgagacttatagtcgctttgtttttattttttaatgtatttgtacatggagaaaataaagtgaaacaaagcactattgcactggcactcttaccgttactgtttacccctgtgacaaaagcccggacaccagaaatgcctgttctggaaaaccgggctgctcagggcgatattactgcacccggcggtgctcgccgtttaacgggtgatcagactgccgctctgcgtgattctcttagcgataaacctgcaaaaaatattattttgctgattggcgatgggatgggggactcggaaattactgccgcacgtaattatgccgaaggtgcgggcggcttttttaaaggtatagatgccttaccgcttaccgggcaatacactcactatgcgctgaataaaaaaaccggcaaaccggactacgtcaccgactcggctgcatcagcaaccgcctggtcaaccggtgtcaaaacctataacggcgcgctgggcgtcgatattcacgaaaaagatcacccaacgattctggaaatggcaaaagccgcaggtctggcgaccggtaacgtttctaccgcagagttgcaggatgccacgcccgctgcgctggtggcacatgtgacctcgcgcaaatgctacggtccgagcgcgaccagtgaaaaatgtccgggtaacgctctggaaaaaggcggaaaaggatcgattaccgaacagctgcttaacgctcgtgccgacgttacgcttggcggcggcgcaaaaacctttgctgaaacggcaaccgctggtgaatggcagggaaaaacgctgcgtgaacaggcacaggcgcgtggttatcagttggtgagcgatgctgcctcactgaattcggtgacggaagcgaatcagcaaaaacccctgcttggcctgtttgctgacggcaatatgccagtgcgctggctaggaccgaaagcaacgtaccatggcaatatcgataagcccgcagtcacctgtacgccaaatccgcaacgtaatgacagtgtaccaaccctggcgcagatgaccgacaaagccattgaattgttgagtaaaaatgagaaaggctttttcctgcaagttgaaggtgcgtcaatcgataaacaggatcatgctgcgaatccttgtgggcaaattggcgagacggtcgatctcgatgaagccgtacaacgggcgctggaattcgctaaaaaggagggtaacacgctggtcatagtcaccgctgatcacgcccacgccagccagattgttgcgccggataccaaagctccgggcctcacccaggcgctaaataccaaagatggcgcagtgatggtgatgagttacgggaactccgaagaggattcacaagaacataccggcagtcagttgcgtattgcggcgtatggcccgcatgccgccaatgttgttggactgaccgaccagaccgatctcttctacaccatgaaagccgctctggggctgaaataaaaccgcgcccggcagtgaattttcgctgccgggtggtttttttgctgttagcaaccagacttaatggcagatcacgggcgcatacgctcatggttaaaacatgaagagggatggtgctatgaaaataacattactggttaccttgcttttcggtctggtttttttaaccaccgtcggcgctgccgagagaactttaaccccacaacaacagcgtatgacctcctgtaatcagcaggcgacggcgcaggcgttgaaaggggatgctcgtaagacctacatgagtgattgcctgaagaacagcaagtctgcgcctggcgaaaaaagtttgacgccacagcagcaaaagatgcgcgaatgcaataatcaagcaacacaacaatctctgaaaggtgatgatcgtaataagtttatgagtgcctgcctcaagaaagccgcctgatacctgatagtgctaacgggtgagctacgaaaatggctcacccgaaatatcatacttctgcctttagctccgtctctataatttgggaaaattgtttctgaatgttcccaaaaataatgaatgatgaaaactttttcaaaaaagcggcggcgcacggggaggaacctcctttaactcctcaaaacgaacatcagcggtccgggctgcgcttcgcccgtcgcgtcagactaccccgtgcggttggcctggctggcatgttcttaccgattgcttcaacgctggtttcacacccgccgccgggctggtggtggctggtgttggtcggctgggcgttcgtctggccgcatttagcctggcagatagcgagcagggccgtcgatccgcttagccgggaaatttacaacttaaaaaccgatgcagtattagcgggaatgtgggtaggcgtaatgggcgtaaacgtgctgccttccaccgcgatgttgatgattatgtgtctgaatttgatgggggcaggcggcccccgtctgtttgtcgcgggtctggtgttgatggtggtttcctgccttgtcaccctcgagctgacgggcattaccgtgtcgttcaatagtgcgccgctggaatggtggctctcccttcccattattgtcatttatcctctgctgtttggctgggtcagctaccagacggcaaccaaactggcggaacataaacgcaggttgcaggtcatgagtacccgcgacggcatgacgggcgtgtataaccgacgtcattgggaaactatgttacgcaatgaatttgataactgtcggcggcataatcgcgatgcaacgttactgattatcgatatcgaccatttcaagagcatcaacgatacctggggccatgatgtgggcgatgaagcgattgtggcgcttacccgacagttacaaattaccctgcgcggtagcgatgtgattggtcggtttggcggcgatgagtttgcagtaatcatgtccggtacgccagctgagagcgccattaccgccatgttacgggtgcatgaagggctaaatacattacgtttgccgaatacgccacaggtaactttacggattagtgtgggggttgcgccgctgaacccacaaatgagtcactatcgtgagtggttgaaatcggcagatttggcgctttacaaagcaaagaaagccggacgtaaccgcaccgaagtggcggcctgacgtccggcgaaagtcatcaggatttgctgagtttttctgatttttccatacacttcgtcatcgcttcgatcactgcagcacggaagcctttctcttccagtacgcgtaccgcttcaatggtggtgcctcccggtgagcagaccatatctttcagtgcccccggatgttctcccgtttccagcaccatttttgcggaacccattaccgcctgagcggcaaatttatacgcctgggcgcgtggcatcccgcccagcacggcggcgtcggccatcgcttcgataaacataaatacgtaggctggcgaagaaccgctcacaccgaccaccgggtggatcatcggctcagcaattacttccgcttcgccaaagcagcggaaaatattcagcacatcagcggtatcttctggggttaccagcgcgtttggcgttacggaggtcatcccggcattaaccagtgcgggagtgttcggcatggcgcggataattttccggtcatggcccagcgcgcgggcaagctggtcgagcgtgacacctgcagcaatagaaacgaccagagagtctttattcaggctggaggtgatttcgctaagcactttaatcatgatgccaggtttaacggcagcaaaaatgatgtcggcgatttgcgccacttcttgcgccgattctgcggcgttgatgccgaactggtcatgcagggcggcgactttatccggggagggggtgtatacccagatttgccctggaagcacctgaccgctggcaatcagaccgccgagaatggcttttcccatattgccgcagccaataaaaccgattttcttttccattgcctcactcctgccgtgaaattcattgttttgataatcgctggcagaagcataaacagaactatgccggaaggcaaaagcgcgacacaatagaggattacccaacaaaggatgactttatgacaatttgggtggatgccgacgcgtgtcccaatgtaattaaagagattttgtatcgcgcggcggaacgtatgcagatgccgctggtactggtagcaaaccagagtttacgcgtgccgccatcgcgatttattcgtacgctgcgcgtcgcggcaggtttcgacgttgccgataacgaaattgtccggcagtgtgaagcgggcgatttggtgatcaccgcagatatacctttggctgctgaagccatcgagaaaggcgctgcggcgcttaatccgcgcggcgaacgttacacgccagcgaccattcgtgagcgcctgacgatgcgcgattttatggataccttacgtgccagtgggatccagaccggcggaccagatagcctttcacaacgtgaccgccaggcctttgccgcggagctggagaagtggtggctggaagtgcaacgtagtcgtggctaaatgtaatttattatttacacttcattcttgaatatttattggtatagtaaggggtgtattgagattttcactttaagtggaattttttctttacaatcgaaattgtactagtttgatggtatgatcgctattctcatgacaccggctttcgccgcattgcgacctattggggaaaacccacgatgacacaacctctttttctgatcgggcctcggggctgtggtaaaacaacggtcggaatggcccttgccgattcgcttaaccgtcggtttgtcgataccgatcagtggttgcaatcacagctcaatatgacggtcgcggagatcgtcgaaagggaagagtgggcgggatttcgcgccagagaaacggcggcgctggaagcggtaactgcgccatccaccgttatcgctacaggcggcggcattattctgacggaatttaatcgtcacttcatgcaaaataacgggatcgtggtttatttgtgtgcgccagtatcagtcctggttaaccgactgcaagctgcaccggaagaagatttacggccaaccttaacgggaaaaccgctgagcgaagaagttcaggaagtgctggaagaacgcgatgcgctatatcgcgaagttgcgcatattatcatcgacgcaacaaacgaacccagccaggtgatttctgaaattcgcagcgccctggcacagacgatcaattgttgattttcgagcgcctatacttaacgttcatcccgtgaaataaggaagaacgatgccaacgaaaccgccttatcctcgtgaagcatatatagtgacgattgaaaaaggaaagccaggacagacggtaacctggtaccaactcagagccgatcatcctaaaccagactcgttgatcagtgaacatccgaccgctcaggaagcgatggatgcgaaaaaacgctatgaggaccctgacaaagagtgaccgcatcagactgctcggaagggattctgagtgccactacaagggatctgcgtcacatttttcataattcatgtttttctaataattagaatattaaacaataacaatccattactggaatcatttggaatctttacattatgccgtgcacgtctgctgctacgctttttgtcatttgtagcacaagtaagtgtcagcagtggtgcttcacacttgcccggtaattaacgacgaaagaaaagtaaggtggatgaacaatgagtgcgtcgttggcgatcctgaccatcggcattgtacctatgcaggaagttttgccgctcctgacggaatacattgacgaagataatatttcccatcatagcctgctggggaagttaagtcgtgaagaagtgatggcggagtacgcgccagaagcaggcgaagacaccattctcacattattaaatgacaaccagctggcccatgtttcgcgtcgcaaagtggagcgtgacctgcaaggtgtggttgaagtgctcgataatcagggttatgacgtcattttattaatgagtacagcaaacattagtagtatgactgcgcgtaatacgatctttcttgagccgtcgcgaatattgcctccactggtttcctctattgttgaagatcatcaggtgggggttatcgttccggttgaggagatgctgcccgttcaggcgcaaaaatggcaaattttgcagaaatcgccggtattttcattgggtaaccccattcatgattcagaacaaaaaatcattgatgccgggaaagaattactggcaaaaggggctgatgtcatcatgctggattgtttaggatttcaccaacgtcatcgcgatttactgcaaaaacagctcgatgttcctgtcttgctgtctaacgtattgattgcacggctggctgcggaattactggtgtaattttgcgtgacagccagcgcctctggcccctatagtgaagtagatgttcaactaccaaacagggccagtttatgcttcaaagtaatgagtacttttccggcaaagtgaaatcaatcggcttttccagcagcagcactggtcgcgccagcgtgggtgttatggttgaaggcgaatacaccttcagcaccgctgagccggaagagatgacggtaatcagtggcgcgctgaatgtgttactgcctgacgcgaccgactggcaggtgtatgaagccggttcggtgtttaatgttcccggtcacagtgagtttcatctgcaagttgccgaacccacctcttatctgtgccgctatctgtaattcctcgccttccccttgaacgggagggcatttttctgaaatatcctttctttagcccataataatatttcctttgctgcgattttttcaatttccgatatattcataatttatcaaggttgatataaatatcagtgaagatctccagatattgttgcggaactggctacgataaaagataaatcagatgatgaatggtggcgtgcattgctgcaaagtcgcaatgatcatttacgccaaacggcattgcgcaacgcacataccccggcgttgttgttaacgacattgactgagcctcaggatcggtcgctggctattaataatccacagctggctgccgatgtgaaaacggcgtggttaaaagaggatccatcattactcttatttgtcgaacaacccgatctttcgctgttacgtgatttagtgaaaaccggggcaacgcggaaaattcgcagtgaagcgcgtcaccggcttgaggaaaaacaatgacacaacgtccatggagcaagttacagcgtaaaacgcataatattgctgcgctaaaaattattgctcgccgtagcgaataattatatgcctggtgtggcttcgtacgccggataagacgcggcaggcgtcgcatccggcattaaaggaaaatcagcaattaacgttgtgcttcgccacctaatccttcaatcaggttttgaattaacgctgccagttcaccagtcatcaggatgaaatcggcatcaaaacgctgggcgaaatcttcacggtcgatatcttcgttttgatcgcgcagctcgtcgcagaacttcagacgcttgagcgaaccatcgtcgcacatcacaaactgaatgcgctgctgccagtcgagcgccagtttagtcaccacttttccggcttcaatgtgattggtgatctcttcgctggtcagatcttgtttcttcgcgcggatcacgccgccatcttccagcaacgatttcagctcggcttcatcaagcagctggaagccctgtgccgcactaccggagcgaacccattcggtcagcgtcagttcaatcgggttttccatgctcaatggtacaaccggtaacgaccccaggcttttacgcagtaatgccagcgtatcttccgcttttttggcactggcgcagtccaccataatcaaaccgttaaccgtgtcgatccacatcattgtctggctaaaacggctgaaagcacgcggcagcagagagtgcagcacttcgtctttcagcgaatctttttcggttttcttcagcttacgcgcctgttccgcttccagtttggcgattttcgcttccagcgcctgtttaatcaccggagacgggaggattttttcttctttgcgcgcgcagataacaatttgaccattggcaacgtgcgttaacgcatcgctgtgcgatcccatcggaggaacccagcccatcttcgccatgtcctggctgccgcatggggtaaatgccatcgaggctagctgtttttccatctcttctgcacgcagcgaaatctcgcggctaagacggtaaaccattaaatttttgaaccacagcatgataatttccacggccttgtcgttaaatttagcgggcatgataacgaattgtcggcggccttgcattgccaatccggttgtccgtctctacgctattgatattgaaaaaaataaggagagtaccgtgcgtataggtatcgatttaggcggcaccaaaactgaagtgattgcactgggcgatgcaggggagcagttgtaccgccatcgtctgcccacgccgcgtgatgattaccggcagactattgaaacgatcgccacgttggttgatatggcggagcaggcgacggggcagcgcggaacggtaggtatgggcattcctggctcaatttcgccttacaccggtgtggtgaagaatgccaattcaacctggctcaacggtcagccattcgataaagacttaagcgcgaggttgcagcgggaagtgcggctggcaaatgacgctaactgtctggcggtttcagaagcagtagatggcgcggcagcgggagcgcagacggtatttgccgtgattatcggcacgggatgcggcgcgggcgtggcattcaatgggcgggcgcatatcggcggcaatggcacggcaggtgagtggggacacaatccgctaccgtggatggacgaagacgaactgcgttatcgcgaggaagtcccttgttattgcggtaaacaaggttgtattgaaacctttatttcgggcacgggattcgcgatggattatcgtcgtttgagcggacatgcgctgaaaggcagtgaaattatccgcctggttgaagaaagcgatccggtagcggaactggcattgcgtcgctacgagctgcggctggcaaaatcgctggcacatgtcgtgaatattctcgatccggatgtgattgtcctggggggcgggatgagcaatgtagaccgtttatatcaaacggttgggcagttgattaaacaatttgtcttcggcggcgaatgtgaaacgccggtgcgtaaggcgaagcacggtgattccagcggcgtacgcggcgctgcgtggttatggccacaagagtaaaaaacgtaggcaattggcgcatcatgcctgatgcgacgcttgccgcgtcttatcaggcctacaaaaggtgccagaaccgtaggccggataaggcgttcacgccgcatccggcaataagtgctccgatgcctgatgcgacgcttgccgcgtcttatcaggcctgcaaaatgtgccagaaccgcgtagggcggataaggcgttcacgccgcatccggcaataagtaatgagcaccgagactataacctaccccagtggtttcgccagcaccggagtatccgccgcttgctggcgcttatagcgaccatacagcagcaacgacgacatcgcagcaaacgaaagcagggcggcaggcagcgccacgtaattatatgccagccccagcgtcagcatcatacctccgcaatatgcgccgacggcgctaccgaggttaaacgctatttgcccacctgcggcacctaataactctccgcctttggcgttttgtagtaacaatatttgtagcggtgctgaaagggcaaataatcccgcgcaacaaataaaagcaaaaataagcgacgttgttttcatgccgccgcagaaaaagagcatcagcagtgccagtacaattataaagtcagtcactgctgcaatgcgcagtggtgaataacgtcctgaaatcctgccacttagcatatttcccagcaccatccctagcccaactaacatcataataaaggtcatcgccgtttccgaaaaaccggaaataaacatcatgtatggctttacgtagctgaaccaggcaaacacacctgcgttgccaaacatcgtggcggcgaaaattaaccacggggccgggctgcgcaaaaagtgaaattgttcgcgcagatttcctttcgcctcgtcgcgaatatctggcacccaaaaatagaccgatgccatcaccgcaatattaaaaacagcgatcaataaaaaggtgtaacgccagctaaattcctgacttaaatacgttcccagcggaatgcccagcaaattggcgactgtcatcccggaaaccatccccgccacggcggcggtgacttttccgggtttgataatttttgataacacgatcgctccgacgccaaaaaatgcgccatgcggaaagccggataccagccgaccaatggcgagcatcaggtaagacgaagagagcgtgaacatggcgttgccaatgacgcacaacgccaccagaaacaacaagatatgtttgagtgagtagcggctggaaaagagtgcgatgattggcgcaccgaccaccacccccagtgcataatacgagatcatatgcccggcggcaggaatcgaaattcctacgttatgcgccagctccgtgagcacgcccataatgccaaattcggccatccccaaaccaaacgtgcccagagccaaagataaaatgacttttttcataccaccatcacaaccaccagaacggctaccaatcaccgtagccaataaagtgatagcttgcaggataacgaccagcaaggccaagagataattcgcccctctgtattcattatcctgctgaatagttatttcactgcaaacgtactttccagtttgctgtagcccaggccgttgatctttttcactttgatctgcaccggaatacgctctttcatcgcttctacgtggctaatcacaccgatggttttgccactggcgttcagggcatccagcgcatcaagggcggtatccagcgtttcgctatccagcgtgccaaaaccttcatcaaggaacagcgagtcaatacgtgttttatggctgaccagatccgaaagcgccagcgccagcgccagactaacgaggaaactttcgccgccggaaagggtacgggtatcgcgtaccgcatctgcctgccaggtatcaacaacctcgacttccagcgcctcgctggctttgcgctgtaacagatagcgcccgtgcagccgggtaagttgctgattagcgagatggactaaattatccagcgtcagcccctgggcaaacttgcggaatttatcgccctctttggaacctattagcgaattcagatatccccagtcctcaacctgctgcgtcatttgagcaatttgctgcattaaggtttgttgttgctgacggttatctgcatcctgcttcagctgctggcgaatctcgccttgactcgtggtgttttcacgcaacttttggtgagtttgcgctaactcttgctgaatctgctccaccgtcacagtgagagccaacccgtcgtcaggtcggtgttgttgatgctgtgccagcgtttctgctgtctgagtgaccagagtttgcgcctgacggcgctggttttccagattctgcttgagctgttccagctgcgttagtgtttgttcatccattagcgccgcaaggaacgcctgctgatcgtcaaagacgctggcctgtagcgcggtgtcaaactgcgcctgggctttttgcagactttgcgccgccagaacatcctgttgctgtaacgtctgctgctggctgtgtaatgcgagacattgttcatgtacctgccgccagttttccaataccacagtttcttcgcagtgcgggagttcatcactttgcggcaacgtttccagaatcggcgtcagctgctgaatacggttttgcagcgcggttaattcgttctggcgttgctgccagctctgcgcttcttgctgacgtgtcgccaaccagctctcttcttcatcttcctgtggcaatgtcagtgcataacccgtcaatgtcgttaaaagtagttgctggcgttgttcaatttgctgttgatactggataatttgctgattatgcgcggcaatctgcccttgtaattcatgccgttggctgagtaaccgcagctggcgttcgtgctcatcttgtgcatccagccacggttgaatatcgtccagtggctgcaaggtgatattgaggctggccgtgacggcttgccattgttgagtaagtgcttgctcatcttgtcggaggctttgcgcttcgttttcatcacgctgaagctgctttgttatggcgtccagttgcccacgtagcgtcgcaccttcttcaccgagctttttaacttcgttttccagcgccagtaatcgagactgattaacgccaggctccagcgcctgatacgcctcgaccgccgggtggctggtggaaccacaaagtgggcaaggctgacccgcctgtaactgtgcacgttgagcttccagcgttttgatgcgcgcttcctgctcgcaaatggttttcacatcggcaagttgctgcgtcttttctttataacgctggcgcatttcgttaagtgcggcgttacgttgcgtctgttcttgcgtgacattctggatagcgacctgtaactgcgccagacgtttttgttggggaacaatctgtccatgcagcgcgaccaggtgctgacgcagtgggcgttgctcagcatgttgcgccagggcggtagcaacttcatcggcggttaacgtcaacgtgatcgccgcaagcgcattaagtttttgctcagcatgggttaactgttgctgccattgccgcagatgctcgcgatcgctggtttgttgggagaactgcgcacgccaacccgccggttcgttgttccactgacggaagcggtcgtgttcctgtaaccaggtattcaggctttgttgctgctgctgtaattctgctgactgcttcgccgcgtggtggcgaatgctcgcgcgaagcgccattgtgctctgtaagcgagtatttacttcttcaatctgctggcgaatatgcgccagcgccgcgctgtgttctgcgatgcgttcccagtgtggacgaagatttcgtgccggttgtgccagactaagcgccgccagttgaggttgcgctttttcttcttcggctaacgcctgttgcaaggcctgctgacggcggctggcttcttgctgcaattcgtcctgacgcgttaaccagtttagcgattgttgttcttgctgctgcgcggtaattaactgtttttcttcgtcagtaagtacctgcaaactcgctgtcagcgattgcacttgttccggcgtgagcaacgtgacgccgctggcctgcgcttgcagcttctccagctctgtgcgggccgatttgtgctgctcaaaaaccatcgccgagatttgcccgtagatttcagtgccggttaactcctcgagcaattccgcgcgttctttgggtttggcattcaggaaggcagcaaattgcccctgcgaaagcagcatcgaacgggtgaagcgcccgtaatccagcccggttaacgtcgctgtcagttccagcttatctttcactttgtcggcgagaattttgccgtcggcgcagcgcgccagctctacgcgtggcacctgcaaattaccgtcgggttggttacgcgcccgattctggctccagaatgcacggtacgcttcacctttcacttcaaactccacctccgccagacattcggcggtatcgcgggtcatgagatcattttgcgattgtgaaacgttagagagacgcggagtttcgtgatacagcgccagacaaatggcgtccagcagggtggttttccccgcacctgttgggccggtaatagcaaacagcccgttgctggcgaacggctcgcgggtgaaatcaatcttccattcgccttttaatgagttcaggtttttcaggcgcaggctgagaattttcatgcttcgtgttctccggcgagggtatgcaacgtcgtggtgaaaagatgctgcagacgttgctgctgcgattcatccagttcttccagtgccagacggcgattgaacacctcttcgacgctgagttcgctgagggtttcacgctgttggctggctaacacacgctcgcgctgttcacgactccgacgtaccagcaatacttcgacaggcaatgattcggttaatgcctggattttgcgctgaatatcatgcagatactcatcagtagtgatttcgatatccagccagacaggtggctcctgcgatacatcgcgccactgttccagctgtgcggtaatcgacgccagatcgcctttcagcactgccatgggttgcgttaccggtacgttcaggttttccacgctctctaatttgccgtttgaaaatgtcaccagatggacatatttactcttaccgcattcatcaaaactcagtggaatgggggagccgcaatagcgaacatgttccatgccgccaataatctgtgcgcggtgaatatgcccgagcgcgatgtagtcggctggtggaaagttttgtgccggaaacgcgtccagcgtgccaatataaatgtcacgcacggcgtcacttttactggcccccacggtcgttaaatgtcccgtggcgatgatgggcagaggctgatcgccgcgcagtttgcaggcatcggcatagtgttgttggtaataatcggtaatcgctgccagtaaatgctgctgtttttcaataccgttaagccccgcctggctggtaataatgtcacgcggacgtaaaaacggaatggggcacagcactgcgcctggcgtcccgtcgcgacgaggcaagatttgcggcgcatgtccggcgctggcgaccacggtagtattgaggaacgccatgatatcgcgcgattcattcagcgtggcgaccgagtcatggtttcctgccagtaccaccagatgacagccagtttgctgtaaattgacaacaaaacggttgtataacgtgcgggcgtaactgggcggcgagccggtatcgaaaacatcaccggcaacaataatcgcatccacctgatgggtttgtgctgtctccagcagccagtcaagaaaagcctgatgttcagcttcgcggcttttactgtagaagttctggccgagatgccagtctgaggtgtgaaggatgcgcataacggttccctggcgaaaaagcatgggcgcgattatacccaaacagatgtgccatttgcttttttctgcgccacggaaatcaataacctgaagatatgtgcgacgagcttttcataaatctgtcataaatctgacgcataatgacgtcgcattaatgatcgcaacctatttattacaacagggcaaatcatggcgagacgtattctggtcgtagaagatgaagctccaattcgcgaaatggtctgcttcgtgctcgaacaaaatggctttcagccggtcgaagcggaagattatgacagtgctgtgaatcaactgaatgaaccctggccggatttaattctcctcgactggatgttacctggcggctccggtatccagttcatcaaacacctcaagcgcgagtcgatgacccgggatattccagtggtgatgttgaccgccagaggggaagaagaagatcgcgtgcgcggccttgaaaccggcgcggatgactatatcaccaagccgttttcgccgaaggagctggtggcgcgaatcaaagcggtaatgcgccgtatttcgccaatggcggtggaagaggtgattgagatgcagggattaagtctcgacccgacatctcaccgagtgatggcgggcgaagagccgctggagatggggccgacagaatttaaactgctgcacttttttatgacgcatcctgagcgcgtgtacagccgcgagcagctgttaaaccacgtctggggaactaacgtgtatgtggaagaccgcacggtcgatgtccacattcgtcgcctgcgtaaagcactggagcccggcgggcatgaccgcatggtgcagaccgtgcgcggtacaggatatcgtttttcaacccgcttttaacgccttgctcatcggacgcagagcagggcttatgatttcttaactggagtatcttacgtgctggaacggctgtcgtggaaaaggctggtgctggagctgctactttgctgcctcccggctttcatcctgggtgcattttttggttacctgccctggtttttgctggcatcggtaacaggactgcttatctggcatttctggaatttattgcgcctttcatggtggctgtgggtggatcgcagtatgaccccgccaccggggcgtggtagctgggaaccgctactatacggcttacaccagatgcagctgcgaaataaaaaacgccgccgtgaactgggcaatctgattaaacgctttcgtagcggcgcggagtcgctgcccgacgcggtggtgctgaccacggaagagggcggtattttctggtgtaacggtctggcgcaacaaattcttggtttgcgctggccggaagataacgggcagaacatccttaacctactgcgttacccggagtttacgcaatatctgaaaacgcgtgatttttctcgcccgctcaatctggtgctcaacaccgggcggcatctggaaattcgcgtcatgccttatacccacaaacagttgctgatggtggcgcgtgatgtcacgcaaatgcatcaactggaaggggcgcggcgtaacttttttgccaacgtgagccatgagttacgtacgccattgaccgtgttacagggttacctggagatgatgaatgagcagccgctggaaggcgcggtacgcgaaaaagcgttgcacaccatgcgcgagcagacccagcggatggaaggactggtgaagcaattgctgacgctgtcgaaaatagaagccgcaccgacgcatttgctcaatgaaaaggttgatgtgccgatgatgctgcgcgttgttgagcgcgaggctcagactctgagtcagaaaaaacagacatttacctttgagatagataacggcctcaaggtgtctggcaacgaagatcagctacgcagtgcgatttcgaacctggtctataacgccgtgaatcatacgccggaaggcacgcatatcaccgtacgctggcagcgagtgccgcacggtgccgaatttagcgttgaagataacggaccgggcattgcaccggagcatattccgcgcctgaccgagcgtttttatcgcgttgataaagcgcgttcccggcaaaccggcggtagcggattagggttagcgatcgtgaaacatgctgtgaatcatcacgaaagtcgcctgaatattgagagtacagtaggaaaaggaacacgtttcagttttgttatcccggaacgtttaattgccaaaaacagcgattaatccgcctttgtcatcttttattgccataagccagtcgatgctggcttattttctttgcagtcaaaatacgggcgttagattttacaacgattggtgattttttgttcgcatgattagccatgtctttttcacggaaatagtgttttatactggttggtgatttcttatcgctatatacctctggtttttagatccctccttgctttaaaacgttataagcgtttaaattgcgcttcaggtgctgtcatactgactgcattaacgcggtaaatcgaaaaactattcttcgccgcgcctggttgggagtatttcccgctaaaattgtttaaatataccgctgtatcatccccagggattggcacaaaaatttaacgttacaacaccacatccacaggcagtatgatttatgacccatcaattaagatcgcgcgatatcatcgctctgggctttatgacatttgcgttgttcgtcggcgcaggtaacattattttccctccaatggtcggcttacaggcaggcgaacacgtctggactgcggcattcggcttcctcattactgccgttggcctgccggtattaacggtagtggcgctggcaaaagttggcggcggtgttgacagcctcagcacgccaatcggtaaagtcgctggcgtactgctggcaacggtttgttacctggcggtggggccgcttttcgctacgccgcgtacagctaccgtttcctttgaagtggggattgcgccgctgacgggtgattccgcgctgccgctgtttatctacagcctggtctatttcgctatcgttattctggtttcgctctatccgggcaagctgctggataccgtgggcaacttccttgcgccgctgaaaattatcgcgctggtcatcctgtctgttgccgctattgtctggccggcgggttctatcagcacggcgactgaggcttatcaaaacgctgcgttttctaacggcttcgttaacggctatctgaccatggatacgctgggcgcaatggtgtttggtatcgttattgttaacgcggcgcgttctcgtggcgttaccgaagcgcgtctgctgacccgttataccgtctgggctggcctgatggcgggtgttggtctgactctgctgtacctggcgctgttccgtctggggtcagacagcgcgtcgctggtcgatcagtctgcaaacggcgctgctattctgcatgcttacgttcagcacacctttggcggcggcggtagcttcctgctggcggcgttaatcttcatcgcctgcctggtaacggcagttggcctgacctgtgcttgtgcagaattctttgcccagtacgtaccgctctcttatcgtacgctggtgtttatcctcggcggcttctcgatggtggtttctaacctcggcttaagccagctgatccagatctccgtaccggtgctgaccgctatttatccgccgtgtatcgcactggttgtattaagttttacacgctcatggtggcataattcgtcccgcgtgattgctccgccgatgtttatcagcctgctttttggtattctcgacgggatcaaagcatctgcattcagcgatatcttaccgtcctgggcgcagcgtttaccgctggccgaacaaggtctggcgtggttaatgccaacagtggtgatggtggttctggccattatctgggatcgcgcggcaggtcgtcaggtgacctccagcgctcactaaatcactgaacatttgttttaaccacggggctgcgatgccccgtggttttttattgtgttgatgggttaggaattgatggaaagtaagaacaagctaaagcgtgggctaagtacccgccacatacgctttatggcactgggttcagcaattggcaccgggctgttttacggttcggcagacgccatcaaaatggccggtccgagcgtgttgttggcctatattatcggtggtatcgcggcgtatatcattatgcgtgcgctgggggaaatgtcggtacataacccggccgccagctctttctcgcgttatgcgcaggaaaacctcggcccgctggcaggttacattaccggctggacctactgctttgaaatccttattgtcgccatcgccgatgtgaccgcttttggtatctatatgggtgtctggttcccgacggtgccgcactggatttgggtactgagcgtggtgctgatcatttgcgccgtaaacctgatgagcgtgaaggtattcggtgagctggaattctggttctcgttctttaaagtcgccaccatcatcatcatgattgtcgccggtttcggcatcatcatctgggggattggcaacggcgggcaaccgaccggtattcataacctgtggagcaacggcggcttcttcagtaacggctggcttggcatggtaatgtcgttgcaaatggtgatgtttgcttacggtgggatcgaaattatcgggattaccgccggtgaagcgaaagatcctgagaaatcgataccgcgtgcgattaactccgtgccgatgcgtattctggtgttctacgtcggtacgctgttcgtcattatgtctatctacccgtggaatcaggttggcactgccggtagcccgttcgtgctgacgttccagcatatgggcattacctttgccgccagcattcttaactttgttgtgctgactgcttcgctgtcggcaattaacagtgatgtatttggcgtaggccgtatgctccacggtatggcagagcagggcagcgcgccgaaaattttcagcaaaacgtcgcgtcgcggtattccgtgggttacggtgctggtgatgactaccgcgctgctgtttgcggtgtatctgaactacatcatgccggaaaacgtcttcctggtgatcgcttcgctggcaaccttcgccacggtgtgggtgtggattatgatcctgctgtcgcaaattgccttccgtcgccgtttgccgccagaagaagttaaggcgctgaaatttaaagtgccgggtggggtagcaacgaccatcggcgggctgattttcctgctctttattatcgggttgattggttatcacccggatacgcgtatctcgctgtatgtcggtttcgcgtggattgttgtgctgttgattggctggatgtttaaacgccgccacgatcgtcagctggctgaaaaccagtaatccttgcgttctgtaagccggttcaggaggaaatcctgatccggctattccgaaagttatccgcccccgtcctcctcccccaaatatccttcagatgatgagtgatcctgcattaggctatggcaaggtgatcagattttcatcacaggggaattatgatgttaaatgcatggcacctgccggtgcccccatttgttaaacaaagcaaagatcaactgctcattacactgtggctgacgggcgaagacccaccgcagcgcattatgctgcgtacagaacacgataacgaagaaatgtcagtaccgatgcataagcagcgcagtcagccgcagcctggcgtcaccgcatggcgtgcggcgattgatctctccagcggacaaccccggcggcgttacagtttcaaactgctgtggcacgatcgccagcgttggtttacaccgcagggcttcagccgaatgccgccggcacgactggagcagtttgccgtcgatgtaccggatatcggcccacaatgggctgcggatcagattttttatcagatcttccctgatcgttttgcgcgtagtcttcctcgtgaagctgaacaggatcatgtctattaccatcatgcagccggacaagagatcatcttgcgtgactgggatgaaccggtcacggcgcaggcgggcggatcaacgttctatggcggcgatctggacgggataagcgaaaaactgccgtatctgaaaaagcttggcgtgacagcgctgtatctcaatccggtgtttaaagctcccagcgtacataaatacgataccgaggattatcgccatgtcgatccgcagtttggcggtgatggggcgttgctgcgtttgcgacacaatacgcagcagctgggaatgcggctggtgctggacggcgtgtttaaccacagtggcgattcccatgcctggtttgacaggcataatcgtggcacgggtggtgcttgtcacaaccccgaatcgccctggcgcgactggtactcgtttagtgatgatggcacggcgctcgactggcttggctatgccagcttgccgaagctggattatcagtcggaaagtctggtgaatgaaatttatcgcggggaagacagtattgtccgccactggctgaaagcgccgtggaatatggacggctggcggctggatgtggtgcatatgctgggggaggcgggtggggcgcgcaataatatgcagcacgttgccgggatcaccgaagcggcgaaagaaacccagccggaagcgtatattgtcggcgaacattttggcgatgcacggcaatggttacaggccgatgtggaagatgccgccatgaactatcgtggcttcacattcccgttgtggggatttcttgccaataccgatatctcttacgatccgcagcaaattgatgcccaaacctgtatggcctggatggataattaccgcgcagggctttctcatcaacaacaattacgtatgtttaatcagctcgacagccacgatactgcgcgatttaaaacgctgctcggtcgggatattgcgcgcctgccgctggcggtggtctggctgttcacctggcctggtgtaccgtgcatttattacggtgatgaagtaggactggatggcaaaaacgatccgttttgccgtaaaccgttcccctggcaggtggaaaagcaggatacggcgttattcgcgctgtaccagcgaatgattgcgctgcgtaagaaaagtcaggcgctacgtcatggcggctgtcaggtgctgtatgcggaagataacgtggtggtatttgtccgcgtgctgaatcagcaacgtgtactggtggcaatcaaccgtggcgaggcctgtgaagtggtgctacccgcgtcaccgtttctcaatgccgtgcaatggcaatgcaaagaagggcatgggcaactgactgacgggattctggctttgcctgccatttcggctacggtatggatgaactaacgttttataacgccttgcgtgacgcctgcgccatcatccgcggataaaactgccagaagcgggtttcgagggcgtcataatgagcgtctaaatcgtaccaggagtcacgcagggcatccagacgtgggcggcggcttgccatgccgtttaacacgttctggatgaaatccatatcgcgatagcgcaccagccactgctctgaccacaagtaattgttcagattgataaaacgtggcggtgagtccggcaaaatcgtcatcacttgctcgcgggcataacagacaaattcctgtagcggaaagtccggcgacagctgcgaccagtggcgggaaagaaagtgatcccacatgacatccagcgtaataggcgcaacgcggcgcgtttcactacgaaaccactcccgtgcttcgcggacttccggcagattgtcagtcaatacgtcgatacgtcgatgcatatgaatgccagccacgacgtcgggcggaaaactttcttcaggatttccgcgtacgaaatcagccagtaaattgccggaaagcgagctttccgcgagatgggctaaatgcaggtgagctaaaaaattcatcgattatattctatccaaaagggggtaaaggttgcagggagagcgccccggcactagactacccgcctcttattttagtctgagtcagtgtcatgcgcgttaccgatttctcctttgaattgcccgaatccctgattgcccactatcccatgcctgaacgcagtagctgtcgtttactgtcgctggacgggccgacgggcgcgctgacgcacggtactttcaccgatttacttgataagctcaaccccggcgatcttctggtttttaataatacccgcgtgatcccggcgcgcctgtttgggcgtaaagccagcggcggcaagattgaagtgctggttgaacggatgctcgacgacaaacgcattcttgcgcatattcgcgcctcgaaagcgccaaaacctggcgcagaactgctgctgggcgatgacgaaagtattaacgcaacaatgaccgcgcgccacggcgcactgtttgaagtcgaatttaatgatgaacgctcggtgctggatattctcaacagcatcggccatatgccgctgccgccgtatatcgaccgtccggacgaagacgctgaccgcgaactttatcaaaccgtttatagcgaaaaaccgggcgcggttgcagccccgaccgcaggtctgcattttgacgagcctttgctggaaaaattgcgcgccaaaggcgtggagatggcgtttgtgacgttgcacgttggtgcgggcaccttccagccggtgcgcgtcgacaccattgaagatcacatcatgcactcggaatacgctgaagtaccgcaggatgtggtagacgcggtactggcggcgaaagcgcgcggtaaccgggtgattgcggttggcaccacttcagtacgttcgctggaaagcgcggctcaggcagcgaaaaacgatctcattgaaccgttcttcgacgatacccaaatctttatctatccgggcttccagtacaaagtggtcgatgcgctggtgacgaacttccacttgccagagtcgacgctgattatgctggtttcggcctttgccggttatcaacacaccatgaacgcctataaagcagcggtagaagagaaatatcgcttttttagttacggtgatgcgatgtttatcacgtacaatccgcaggcaattaatgagcgcgtcggggagtaattccgcggcgctggtttaaaacgttggactgtttttctgacgtagtggagaaaaaatgaaatttgaactggacaccaccgacggtcgcgcacgccgtggccgcctggtctttgatcgtggcgtagtggaaacgccttgttttatgcctgttggcacctacggcaccgtaaaagggatgacgccggaagaagttgaagccactggcgcgcaaattatcctcggcaacaccttccacctgtggctgcgcccgggccaggaaatcatgaaactgcacggcgatctgcacgattttatgcagtggaaggggccgatcctcaccgactccggcggcttccaggtcttcagccttggcgatattcgtaaaatcaccgaacagggcgtgcacttccgtaacccgatcaacggcgatccgattttcctcgatcctgaaaaatcaatggagattcagtacgatcttggttcggatatcgtcatgatctttgatgagtgtacgccgtatcctgctgactgggattacgcaaaacgctccatggagatgtctctgcgttgggcgaagcgtagccgtgagcgttttgacagtctcggaaacaaaaatgcgctgtttggtatcatccagggcagcgtttacgaagatttacgtgatatttctgttaaaggtctggtagatatcggttttgatggctacgctgtcggcggtctggctgtgggtgagccgaaagcagatatgcaccgcattctggagcatgtatgcccgcaaattccggcagacaaaccgcgttacctgatgggcgttggtaaaccagaagacctggttgaaggcgtacgtcgtggtatcgatatgtttgactgcgtaatgccaacccgcaacgcccgaaatggtcatttgttcgtgaccgatggcgtggtgaaaatccgcaatgcgaagtataagagcgatactggcccactcgatcctgagtgtgattgctacacctgtcgcaattattcacgcgcttacttgcatcatcttgaccgttgcaacgaaatattaggcgcgcgactcaacaccattcataaccttcgttactaccagcgtttgatggcgggtttacgcaaggctattgaagagggtaaattagagagcttcgtaactgatttttaccagcgtcaggggcgagaagtaccacctttgaacgttgattaatattaataatgagggaaatttaatgagcttttttatttctgatgcggtagcggcaacgggtgcaccggcgcaaggtagcccgatgtctttgattttgatgctggtggtattcggtctgattttctatttcatgatcctgcgtccacagcagaagcgcaccaaagaacacaaaaagctgatggactccattgccaaaggtgatgaagttctgacgaacggtggcctggttggtcgcgtaaccaaagtagcggaaaacggctacattgctatcgcgctgaatgacaccactgaagtagttattaaacgtgacttcgtagctgccgtcctgccgaaaggcaccatgaaggcgctgtaattaaaatttttccctaagggaattgccgtgttaaaccgttatcctttgtggaagtacgtcatgctgatcgtggtgattgtcatcggtctgctgtatgcgcttcccaacctgtttggtgaggatccggctgttcagatcactggtgcgcgcggagtcgccgccagtgagcaaacgctgatccaggtccagaaaacgttacaagaagaaaaaataactgctaagtctgtggcactggaagagggcgctattcttgcgcgcttcgactccactgacacccagttgcgcgctcgtgaagcattaatgggcgttatgggtgacaaatacgtcgtggcgcttaaccttgccccggcaacgccgcgctggctggcagctattcacgctgagccgatgaagctcggccttgacctgcgtggcggcgttcacttcctgatggaagtggatatggacaccgcgcttggcaaactccaggaacaaaatatcgatagcctacgcagtgacctgcgcgaaaagggcatcccgtataccactgttcgtaaagaaaacaactacggcctgagcatcactttccgcgatgctaaagctcgtgatgaagccattgcgtatctgagcaagcgccatccggacctggtgattagcagccagggcagcaaccagctgcgtgcggtaatgagcgatgctcgtctgagtgaagcgcgtgaatatgcggtgcagcagaacattaatatcctgcgtaaccgtgtaaaccaacttggcgtggcggagccggtggttcagcgtcagggtgctgaccgtatcgttgttgaactgccaggtattcaggacactgcgcgtgcgaaagagattctgggtgcgacggcaacgctggaattccgtctggtaaacaccaacgttgaccaggccgctgcggcatccggtcgcgtaccgggcgactctgaagtgaaacagacccgcgaaggtcagccagttgtgctgtacaaacgcgtaattctgaccggtgaccatatcaccgactccacttccagccaggacgaatacaaccaaccgcaggttaacatctcgctcgatagcgctggtggtaacatcatgtctaacttcactaaggacaacatcggcaaaccgatggcaaccctgtttgtggagtacaaagacagcggtaagaaagatgcaaatggtcgtgcggttctggtgaaacaggaagaggtgattaacatcgccaacatccagtctcgtctgggtaacagcttccgtatcaccggcatcaacaacccgaacgaagcccgtcagctgtcactgctgctgcgtgccggtgcgttgatcgcgccgattcagattgttgaagaacgtaccattggcccaaccctgggtatgcagaacattgaacaggggctggaggcttgccttgccggtctgctggtttctattctgttcatgatcatcttctataagaagtttggtctgattgcgaccagtgctctgattgccaacttgatcttaatcgtcggcattatgtcgctgttgccaggcgcaacgctgagtatgccaggtatcgcgggtatcgtcttaacccttgcggtggcggtcgatgcgaacgtactgatcaacgaacgtattaaagaagagttgagcaacggacgtactgttcaacaggcaattgatgaaggttatcgtggcgcattcagttctatcttcgatgcgaacatcaccacgctgattaaagtcatcatcctgtacgcagtgggtaccggggcaattaaagggttcgcgattactaccggtatcggtgtggcgacgtcgatgtttaccgcgattgtcggtacgcgtgccatcgtaaacctgctatatggcggcaagcgcgtcaagaagctgtcaatctgaggagtgcgatgtggcacaggaatatactgttgaacaactaaaccacggccgtaaagtctatgactttatgcgctgggactactgggctttcggcatctctggtctgctgttaatcgctgctatcgttattatgggcgtgcgcggctttaactgggggctggatttcaccggtggtacggttattgaaattacgctcgaaaaaccggctgaaattgacgtaatgcgtgatgcattgcaaaaagccggttttgaagagccgatgctgcaaaactttggtagcagccatgacatcatggtccgtatgccgcctgctgaaggcgaaaccggcggtcaggtgttgggcagccaggttctgaaggtgattaacgaatccaccaatcagaatgcagcagtgaagcgtattgagttcgtcggtccgagcgtgggggcagaccttgcgcaaaccggtgcgatggcgttgatggcagcgctgctgtctatcctcgtgtacgtaggtttccgctttgagtggcgactggcggcaggggtggttattgcgctggcgcacgacgttatcattacgctgggtattttgtcgttattccatatcgagattgacctgaccattgtggcatcgttgatgtcggttatcggttactcgcttaacgacagtatcgtggtatcggaccgtattcgtgaaaacttccgcaagatccgtcgcggtacgccttacgaaatctttaacgtgtccttgacccagacgctgcaccgtaccttgatcacatccggtactaccttgatggttatcctgatgctgtacctcttcggtggtccggtactggaaggcttctcgctgaccatgcttatcggtgtttccatcggtactgcatcttccatctatgtggcatctgcgttggctctgaaactgggtatgaagcgcgaacacatgttgcagcagaaagtggaaaaagaaggggcggatcagccgtcaattctgccgtaatcaagttcccgttgatgttgaaaatcccggtcagaagatcgggattttttttgatgtatggagattgcgaaaatccccgcatcttgggaaactgcgcgtaaccctacatttcatccaggtaacttttcatggctatcatcccaaaaaactatgcgcggttagaaagcggctatcgcgaaaaagcattaaaaatctatccgtgggtctgcggtcgctgttcccgcgagtttgtttattccaacctgcgtgaacttaccgttcaccacattgatcacgaccataccaataacccggaagatggcagtaactgggaattgttgtgtctctattgccacgatcatgagcattcgaaatataccgaagcggatcagtatggtacgaccgttatcgcaggggaagatgcgcagaaagatgtcggtgaagcgaagtacaacccattcgctgacctgaaagcgatgatgaacaagaagaagtgattaaaacgtaaaattgcctgatgcgctacgcttatcaggcctacgttatttcagcaatatattgaatttacgtgcttttgttggccggacaaagcgtttacgccgcatccggcatgaacaaagcacacgttgttaacaatcagaaatgccgggaataaatcccggcattttcataatcagaagttgtaacctactaccaggtaaccaccccagccggtagagcgaacgttgaagttgccgttgccgaagttcagttctgcatcgtcgttccactgaccaccgtcgtgccagtaacgagctacgacagagtagtgccagtgatcgtagttcagagccagaatatggctggaagcgatagagttattagtacgggtcttaataccgttgattgcgttaccgctgtcatcccctaaatcggaaccccagtcgaagttggtgaagccgatgtagctcagctgaccgccccacagatcggtaatcggcacaaagtatttaattttgaaacggtaaccgtcccactcgttttcgttcgctgcgccatagttctgccactggtatttcgcatagacgttcatggacaggctcatcggcaggccagtgtcgatatcggtacccagacccatgtaccaggtgctctggcgaccatctttattacgacccatgtcgtaaatgtagttgttcgcgaagtaccactctttgaacggaccgaagctaaggtcagtattggtcagcttgtcgatggagaaacgtggttcgatttccataaacagcggagaaccgtggttccagatacctttagcatcggagttaccgccgaagaataccggcgcatccgcataaccatagaagtcgaaccagtcttttttagcgaatgcttcgtactcaaggtaggtatcgttgcggatctgcggtccgaaacgggtgtgatagcttccgacaacgttaacgctctggtgccaccagtcggaaagatactgcggtttgtcgttttcagctgcgttgacagtaaaagacgaagagagcgccagtaccgcaccggctgccagtaatgtttttttcatatgtatgccactgtttgaaaatcccttgcgggagtgaaaaaggcgcaaattgcgtttctaaatatttcgtatacagaggagcctattataaaaatcattgctcacaaaaatatgtttcgtttcacagttctatcatttacgtaatcgattgcgttcacgtttacacacattcgggcggggattgtactgactttcgcccttgttgcaaacttttactatcaatccaggtgatgtaagcagagtaacaaaatgacggggaaagatgttgcgggacgcacaaaatcgtcccgaaatacgtttactgcataacaggttgaatgtcgtggatacgtacaaagcctaactgatccacagaaatcccctttaactgtaacggaatatcaacatcgctgggggcgaggacgctggcaggggcattaatcaattgattctgcacattgatttcctgaaagttgtctattgttccctgaatttgcccatattcaacagttccgctgaatgcgggcaagggatcattcgactcaccctgaatacgtagtgtaagggtggtgccatctgcatcaggcgtaatattcaccagcgacatacgtaaagtaccgatctggctttccagtcttgccggtgttttcgctccaggcagaaggtaaaccccactgctggattttgcattcagcctgttttgctgagtgattttgactgtttcttgattgagttgcgtcatctcctggttcagcgtgctgacgctgtgtttcatctgtcgcacttcactttgctgcacacaggcgctaaggctgaacaggcttcccagcaggagcagtcgaaaaacgttagtattcataggtcgtccctttctcgtcgcaattagcctaatggtagagggtaaaagcagcgaaagcatcgatcctttatctcaaaagcgttgcgcctttgttgtatcgtcagttcagggtaaaatagatttccgttaaccacctggtcaggacgccgtatgcattgcccattctgtttcgccgtggacactaaggtaattgactctcgtctcgtgggcgagggttcatccgtacgccgccgtcggcagtgtctggtgtgtaatgaacgtttcaccacctttgaagtggcggagctggttatgccgcgtgttgtaaaaagcaacgacgtgcgtgaaccgtttaatgaagagaaattgcgtagcggaatgctgcgggcgctggaaaaacgtccggtgagttccgatgacgtcgaaatggcaatcaatcatattaaatcgcagctgcgcgccaccggtgagcgcgaagtgccgagcaagatgattggcaatctggtgatggagcaattgaaaaagctcgataaagtcgcctatatccgttttgcctctgtctaccgcagtttcgaagatatcaaagaatttggcgaagagatcgcgcgcctggaggactaagccgtgcaggacgagtattacatggcgcgggcgctaaagctggcgcaacgaggacgttttaccacgcatcccaacccgaatgtcgggtgcgtcattgtcaaagatggcgaaattgtcggtgaaggttaccaccaacgtgcgggtgaaccacatgccgaagtacacgcgttgcgtatggcgggtgaaaaagccaaaggtgcgaccgcctatgtcacactcgaaccctgtagccatcatggtcgtacgccaccgtgctgtgacgcactcatcgccgctggcgtagcgcgcgtggttgcctcgatgcaagatcctaacccgcaggtcgctgggcgtggactttaccgtctgcaacaggctggcattgacgtcagccacggcctgatgatgagtgaagccgagcaattgaataaaggctttctcaagcggatgcgcaccggctttccttatattcagttaaaacttggcgcatcgcttgatggtcgcacggcgatggcgagcggcgaaagccagtggatcacttcgccccaggcgcggcgtgatgtacaactactgcgcgcgcaaagtcatgccattttaaccagcagcgccacggtgctggcggatgatcctgccttaacggtgcgttggtctgaactggatgaacaaactcaggcgctctatccgcaacaaaatctccgtcagccgatacgtattgtgattgatagccaaaatcgcgtgacgccggtacatcgcattgtgcagcagcccggcgaaacctggttcgcgcgtacgcaggaagattctcgtgagtggccggaaacggtgcgtaccttgctgattccagagcataaaggtcatctggatctggttgtactgatgatgcaactgggtaaacagcaaattaacagcatctgggtggaagcggggccaacgctcgctggcgcattgctgcaggcgggtttagtcgatgagctgattgtctatatcgcacctaaactattaggcagcgacgcccgcggattatgcacgctgccagggcttgagaaattagccgacgccccccaatttaaattcaaagagatacgtcatgtaggcccggatgtttgcctgcatttagtgggtgcatgatctcccggctcgaaagggaagcagcgcacgaaatattatgctaaaatccgcccccctgcggggccatactcgaacccgaaggaagaaaatgaacattattgaagctaacgttgctaccccggacgctcgcgtcgccatcaccatcgcgcgtttcaacaactttatcaatgacagcctgctggaaggtgcaattgacgcactgaaacgtatcggtcaggtaaaagatgaaaacattaccgttgtttgggtgcctggtgcctatgagctgccgctggcggcgggtgcactggctaaaaccggtaaatacgacgcggtgattgcgctgggtacggttattcgtggtggcactgcccactttgaatatgtcgctggtggtgcaagcaacggcctggcgcatgttgcccaggacagcgaaattccggttgcttttggggttctgaccactgaaagcattgaacaagcgatcgaacgtgctggcaccaaagctggcaacaaaggtgcagaagctgcactgaccgcgcttgaaatgattaatgtattgaaagccatcaaggcctgaaattagtaaggggaaatccgtgaaacctgctgctcgtcgccgcgctcgtgagtgtgccgtccaggcgctctactcctggcagttgtcccagaacgacatcgctgatgttgaataccagttcctggctgaacaggatgtaaaagacgttgacgtcctgtacttccgtgagctgctggccggggtggcgactaataccgcatacctcgacggactgatgaagccatacctgtcccgcctgctggaagaactgggacaggtagaaaaagcagtactgcgcattgcgctgtacgaactgtctaaacgtagcgatgtgccatacaaagtggccattaacgaagcgatcgaactggcgaaatcgttcggcgcagaagacagccataagttcgtcaacggcgtactcgataaagcagcacctgtgattcgccctaacaaaaagtgatatccaggccggtagattcacggaagaccgttccatgatcgccggccttttcttttttacctgctgaggcataacgtatggcatgtggcgagttctccctgattgcccgttattttgaccgtgtaagaagttctcgtcttgatgtcgaactgggcatcggcgacgattgcgcacttctcaatatccccgagaaacagaccctggcgatcagcactgatacgctggtggcgggtaaccatttcctccctgatatcgatcctgctgatctggcttataaagcactggcggtgaacctaagcgatctggcagcgatgggggccgatccggcctggctgacgctggcattaaccttaccggacgtagacgaagcgtggcttgagtccttcagcgacagtttgtttgatcttctcaattattacgatatgcaactcattggcggcgataccacgcgtgggccattatcaatgacgttgggtatccacggctttgttccgatgggacgagccttaacgcgctctggggcgaaaccgggtgactggatctatgtgaccggtacaccgggcgatagcgccgccgggctggcgattttgcaaaaccgtttgcaggttgccgatgctaaagatgcggactacttgatcaaacgtcatctccgtccatcgccgcgtattttacaggggcaggcactgcgcgatctggcaaattcagccatcgatctctctgacggtttgatttccgatctcgggcatatcgtgaaagccagcgactgcggcgcacgtattgacctggcattgctgccgttttctgatgcgctttctcgccatgttgaaccggaacaggcgctgcgctgggcgctctctggcggtgaagattacgagttgtgtttcactgtgccggaactgaaccgtggcgcgctggatgtggctctcggacacctgggcgtaccgtttacctgtatcgggcaaatgaccgccgatatcgaagggctttgttttattcgtgacggcgaacctgttacattagactggaaaggatatgaccattttgccacgccataaagatgtcgcgaaaagtcgcctgaagatgagtaatccgtggcatctacttgctgtcggattcggaagtggattaagcccgatcgttcctgggacgatgggctcgctggcagcgattccgttctggtatctgatgacctttttgccctggcagctctactcgctggtggtgatgctggggatctgtatcggcgtctatctttgtcatcaaacggcgaaagacatgggtgtgcacgatcatggcagcattgtctgggacgaatttattggtatgtggatcacgctcatggcgctgccgaccaatgactggcagtgggttgccgccgggtttgtgattttccgtattctggatatgtggaagccgtggccgatccgctggtttgatcgcaatgtgcatggcggcatggggatcatgatcgacgatattgtcgccggggtgatttccgcaggcatcctgtattttatcggtcatcactggccgctgggtattctgtcgtagttgtgcaccgatgcctgatgtgacgcttgtcacgtctcatcaggcctggactcttatttaaatcctacgacaggatgcggtttatacggcgtttccagttcggcaatctgttccggcttcaaagtgatatccaccgcgttcaatagctcatcaagctgttcttcgcgcgaagttccgataatcggtgcggcaatgcccggtttactcaacaaccaggccagcgcaacttgtgctcgtgtcgcccccagttcttcactgacgcctgttaaccgctctgcgatctgcgcgtcattttcatcgctttctttatagagatttttccccacctcatcagacaccagtcgtgcggtagtttctccccacggacgcgtcagacggccccttgccagcgggctccatggaattaccgccacgccctcctgataacacagtggtagcatctcgcgctcttcttcacgataaatcagattgtagtgatcctgcatactgacaaactgcgcccagccgtgctgtttttggagttccagtgcctgagcaaactgcgaagcgtgcattgatgacgcgccgatataacgcgctttcccggcttttaccacgtcgttgagggcttccagcgtctcttcgatcggcgtgttgtaatcccagcgatgaatttgcaggatatcgacataatccatgccgagacgtcgcaggctgtcgtcgatagagcgcaaaatttgcgcacgggataatccttccggtaaatcaccaacgcgatggaacactttggtcgcaacgaccacgtcttcacgacgggcgaaatcccgcagtgcgcgaccgacgatctcttcgctgctgccgtcagaataactgttggcggtatcaaagaaatttatgccgccttccagtgcacgtttaattatgggacggctgctttcttccggcagtgtccatgcgtgattaccgcgatctggctcgccaaaggtcatacagccgaggcaaagtcgggaaacgcgaaggtcggtttttcctaaggggttgtattgcatgctgccactcctgctatactcgtcatacttcaagttgcatgtgctgcggctgcattcgttcaccccagtcacttacttatgtaagctcctggggcttcactcgtttgccgccttcctgcaactcgaattatttagagtctatgaataatttcttaagcatagcaggagtggagtagggattatgccagccaggccttgattttggcttccataccagcggcatcgaggccgagttcggcgcgcatttcttcctgagttccttgcggaataaagaagtccggcaggccaatgttcagcacgggtactggtttacgatgggccatcagcacttcgttcacgccgctgcctgcgccgcccataatggcgttttcttctacggtgaccagcgcttcatggctggcggccatttccagaattaacgcttcatcaagcggtttcacaaaacgcatatcgaccagcgtggcgttcagcgattcggcgactttcgccgcttctggcatcagcgtaccaaagttaaggatcgccagtttctcgccacgacgcttcacaatgcctttgccaattggtagtttttccagcggcgtcagttccacgccgaccgcgttgccacgcgggtagcgcaccgctgacgggccatcgttatagtgatagccggtatagagcatctggcgacattcgttttcatcgctcggggtcataatgaccatttccggtatgcagcgcaggtaagagagatcaaaagcaccctgatgggtttgaccgtcagcaccaacaatgcccgcgcggtcgatggcgaacaggaccggaagcttttgaatcgccacgtcatgcagcacctgatcataggcgcgttgcaggaaagtggagtaaatcgcgacaatgggtttgtacccaccaatcgccagacccgcagcaaaggtcaccgcgtgttgctcggcaattgccacgtcgaagtagcgatccgggaatttacgtgaaaactcgaccatgccggaaccttcacgcatcgccggagtaatcgccatcagcttgttgtctttcgctgccgtttcgcacaaccagtcgccaaagatttttgaatagctcggcaaaccgccgctacttttcggcaaacaaccgctggagggatcaaatttaggcacggcgtggaaagtgatcgggtctttttctgccggttcataaccacgaccttttttggtcatgatatgcaggaactgcgggcctttcaggtcgcgcatgttctttagcgtggtgataagccccagcacatcgtgaccgtccaccgggccgatgtagttaaagcccagctcttcaaacaacgtgccaggcactaccatgcctttaatatgttcttcggtgcgtttgagcagctctttaattggcggcacgccagagaaaacttttttcccgccttcgcgcagtgaagagtaaagcttaccggaaagcagctgtgccagatggttgttgagcgcgccgacattttcggaaatcgacatttcattgtcgttgagaatcaccagcatatcaggacggatatcgcccgcgtgattcatcgcttcaaacgccatgcctgcggtaatcgcgccatcgccaatgacacagacggtgcggcgatttttgccttctttttcggcagcaaccgcaataccaattccggcactgatggaggttgatgaatgcccgacgcttaatacgtcatattcgctttcgccgcgccacgggaacgggtgcagaccgcctttctgacggatggtgccgattttgtcgcggcgtccggtcaaaattttatgcggataagcctgatgccccacatcccaaatcaattggtcaaacggggtgttgtagacatagtgcagcgccacggtcagttcgaccgtgcccagcccggaggcgaagtgcccgctggaacggctcacgctgtcgagtaaatagcggcgcagttcgtcgcagagtttcggtaaactctctttcggcaacagtcgtaactcctgggtggagtcgaccagtgccagggtcgggtatttggcaatatcaaaactcatcaggggcctattaatacttattgtttatttattacgctggatgatgtagtccgctagcgcttccagtgccgaggtatcgagtgactgttcagccagttgtttcagcgactgacgggcatcgtcgatcagatcccgggctttcttccgggcttgctcaagacccagaagtgcagggtaggtacttttaccaagttgctggtcggcaccctggcgttttcccaacgttgcagtatctcccaccacatccaggatgtcatcctgaacctggaaggcaaggccgatgctctctgcatacttgtcgagtaccggcagagcacgacgtcctttatctccggcgcttaatgcaccaaggcgaacggcggcgcgaatcaatgcgccggttttatgacgatgaatacgctcaagcgcgtccagaggtacgtgtttgccttccgcgtctaaatctaatgcctgaccaccgcacattccggcaataccactggcgctcgccagttcagaaatcatcgaaattctgtcgcggtccgacacttccggcatatcggcatcgcttaaaatcgagaacgccagcgtttgtaaagcgtcgccagcgagaatcgcgtttgcttcgccaaacttcacatggcaggttggcaaaccgcgacgcagatcgtcatcatccattgccggtaaatcatcatgaattaatgagtaagcgtggatacactcaacggcggcagcgggtgcgtccagcgtgtttgtgctaacgccgaacatatgaccggtggcataaaccaggaaaggtcgcaggcgcttaccacctaataatgcgccatactgcatggtttcgaccacgggagtgttctgaaagggcagtggggcgataaaacggctcagcgcctggttggcctgcttaacgcaggcttcgagttgctgcggaaagtccattactcattgtccggtgtaaaaggggttagagaggcgtcttcattgtcagacagcagaatttgtacgcgctgttcggcttgttgtaatttggcctgcccctgacgtgccagctgcacgccgcgttcgaactcgttcagcgcctcttccagcggcaggtcgccactttccagacgggttacaatctgttccagctcgctcagcgccttttcaaagctggcgggcgcctcatttttcttcggcataatgaatgtctgactctcaatatttttcgccccgtcatggtaacggactcagggcaaatagcaaataacgcgcaatggtaaggtgatgtgcacagcaaagcgatgttagtggtatacttccgcgcctggatgcagccgcaggtgtgggctgctgtatttttccctatacaagtcgcttaaggcttgccaacgaaccattgccgccatgaagtttatcattaaattgttcccggaaatcaccatcaaaagccaatctgtgcgcttgcgctttataaaaatccttaccgggaacattcgtaacgttttaaagcactatgatgagacgctcgctgtcgtccgccactgggataacatcgaagttcgcgcaaaagatgaaaaccagcgtctggctattcgcgacgctctgacccgtattccgggtatccaccatattctcgaagtcgaagacgtgccgtttaccgacatgcacgatattttcgagaaagcgttggttcagtatcgcgatcagctggaaggcaaaaccttctgcgtacgcgtgaagcgccgtggcaaacatgattttagctcgattgatgtggaacgttacgtcggcggcggtttaaatcagcatattgaatccgcgcgcgtgaagctgaccaatccggatgtgactgtccatctggaagtggaagacgatcgtctcctgctgattaaaggccgctacgaaggtattggcggtttcccgatcggcacccaggaagatgtgctgtcgctcatttccggtggtttcgactccggtgtttccagttatatgttgatgcgtcgcggctgccgcgtgcattactgcttctttaacctcggcggcgcggcgcatgaaattggcgtgcgtcaggtggcgcattatctgtggaaccgctttggcagctcccaccgcgtgcgttttgtcgctattaatttcgaaccggtcgtcggggaaattctcgagaaaatcgacgacggtcagatgggcgttatcctcaaacgtatgatggtgcgtgccgcatctaaagtggctgaacgttacggcgtacaggcgctggtcaccggcgaagcgctcggccaggtgtccagccagacgctgaccaacctgcgcctgattgataacgtctccgacacgctgatcctgcgtccgctgatctcttacgacaaagagcacatcatcaacctggcccgccagattggcaccgaagactttgctcgcacgatgccggaatattgtggtgtgatctccaaaagcccgacggtgaaagcagttaaatcgaagattgaagcggaagaagagaagttcgacttcagcattctcgataaagtggttgaggaagcgaataacgttgatatccgcgaaatcgcccagcagaccgagcaggaagtggtggaagtggaaaccgtcaatggcttcggcccgaacgacgtgatcctcgatatccgttctatcgatgaacaggaagataagccactgaaagtcgaagggattgatgtggtttctctgccgttctataaactgagcaccaaatttggcgatctcgaccagaacaaaacctggctgctgtggtgtgagcgcggggtgatgagccgtctgcaggcgctctatctgcgcgagcagggctttaacaatgtgaaggtatatcgcccgtaatttgtggtttttacgtcgcatctggtcagatgcgacgtttgccgcatccgacactactcgtaataattataaatccctgccgccatcaccagttgtgatgccacttcatgggctttttcacgcccaaccaacaggtcgataattttcagaccaaagtcgatagctgtacccggcccctggctggtcagcaattttacccgtgcatcccagacgacgcgcttgtccagccattgttcggcgggaattttgtctttcagcgtcgggaagccggtcatattaccaatcgggaagatatcgtgcggcaccagcacggtggctggcgcggcgcaaatagccgcgacgatacgcccggaacggtggaactgtttaacggtttcaaccagcagagtgctatcgcgaaaacactccgcgcctttaatgccaccaggcagcacgatcacgtcatattcgccatcagccacttcgaccagcggcgcatccgccagcagcttcacgccgcgcgagcaggtaatcgccaggttaccatcgctggcgacgctggcagtggtgactttgataccgccgcgaaccagcagatcgatagtggtgacggcttcagtctcttcactaccaggggcgaggcaaaccagtgccgatgcgctcatattcactctcctttctttttaccatttcaaacaggcgggtgttttccggtacggcaatcccatgcgcgcgggcgcggcgtaagagaaaaccattgatatagtcgatttcagtgtggcgcagcgcgcggatatcctgcaacatcgacgagatattttccgctgtggcatcaatcacctgcatcacgtaatcacgcaaatcttctgctgaagtatgatgcccttcgcgttcgatcaccgccgcgacttcttcgcatatctgcataatttcttgcggatgatgacgtaattcaccgttcgggcaattccagatggcagtcagtggattaatcacgcagttgactgccagcttgcgccacagctcggcgcgaatattgttatgccaggcaacgtcaggcaacacggtttgcaaaatatccgccagataactgtaatccccgtcctgttgccgtgccgggccaatatgcgtgataccgtttgccacatgaataatgacattgccgtcgcggcgggctgcatgggtggtggtgcccatcagtaatggctgctgaatgttttgcaactcttcgatggtgcccatgccgttgtgaattaacagtattggcgtagttacaggcagtgtggacgcgaggcttttgacggcatcggaaacctgccatgctttcagcgtcaccaggagcagatcgctggtggcgagaaaatcgggatcgttggcggtcagcgattcgttaaatatcgaaccatctgtctcaaccagattcacgctacaataaggttgcggtacgcgcagccagccctgaacttcatgaccctgtttgcaaagtgctgtaagccataattgccctaaggcaccgcatcccaatacggtaattttcattgttcctcctcacccgcaaccactccgggtgttcaataaggctatcccttaattgtgcatgctgttgcgactatgcacaattaagggatacgtcctggtgcaggactgtcggttatttaactttgcgggtattatgcttcgcatcaaaaatgaagggagaggaaaagatgccatctttcgatattgtctctgaagttgatcttcaggaagcacgtaacgcggtcgataacgcgagccgcgaagtggagtcccgttttgacttccgtaacgttgaagcctcatttgagctgaacgacgccagcaaaaccatcaaagtgttgagcgagtccgatttccaggtcaatcagttgctggatattctgcgtgccaagctgctgaagcgcggcattgaaggcagttcgctggatgtaccggagaatatcgttcatagcggtaaaacctggtttgtggaagcgaaactgaaacagggcattgagagcgcgacccagaagaaaatcgtcaagatgatcaaagacagcaaactgaaagtgcaggcgcaaattcagggcgatgaaatccgcgtaacgggcaaatctcgtgatgatttgcaggctgtcatggcgatggtacgtggtggcgatctcggtcagccgttccagttcaaaaacttccgcgattaatcgcgactatgtgcgttttgttcatgtcagatgcggcatgaacgcctgattcggcctacaaaggtttgtaattcagaaactttgtaggcctgataagcgtagcgcagcaggcaattcgccgcgttttttatgcctgacgaattgcctgttctatctcaaagcgattcgtcactttgctgtcgattttcacataagctgaatgttcttcttctgcaatcaacacttctttgatgccttcagtttctagcaaacgcacttttaacgcctcgtttgcggcaatgttcgccgggatttcaatgcgcaaactgctgacatacggcggttctttcatggtactggcgactgtcagccacactgcggccagcattgcgccagcgagaaataccccctgaccgtcaaacatgccgttaatccagccgcccagcgaaccgccaatcgccacgccaagaaactggctggtggagtaaacacccatcgccgtacctttgtaacctgctggcgactctttactgataagtgagggcaggagggcttccatcaaattaaacgccacaaagaaaagctgcacgccgaccaccagttgccagaactgcgtttgcgcgttccacaacacaatttccgcaaccacgatcaacccgacgcagaagacaaagacttgcttcattttgcgcttaacttcagcgtagataatgaaaggcacgaccgagccaaaggcgattagcattgtcgccagatagaccttccagtgttcagccgccgggaaccctgcatcagccagttgtccgggcagggcaacaaacgtcgacatcagcaaaatatgcagacacataatgccaaagttgagtttcagcagccgcggttccgccagcactttactgaaactgcctttcaccattccggactcacgattaagtacgtgagtgctactgttgggcacaacccaaatggtcaacgcaatgccggtcgttgccagaatagcgatcatccagaacagcgcgtgcagcccaagtttgtgagtgatgatcgggccaagcaccatcgcaatggcaaaggtaatgccaaagctcacgccgataaacgccatcgctttggtgcggttttgttcgcgcgtgagatcggaaagcagcgccataacggcggcggcaattgctccagagccttgtagcgcccggcccagaataattccccagatggagtcggaaagcgcagcgataacgctaccggcggcaaacaccgccagcccaccgacaattaatggtttgcgaccaatgcggtcggaaagcaggccaaacggaatctgaaaaacggcctgagtcagaccataaataccaatggcaataccgattaatgcttcgctggcaccttgcagagccatgccgtacgtggtcagaaccggcagaaccataaacatgcccagcatgcgcaacgagaatacggtccctaaaccccaggtcgcgcgcctctcacctggcgtcattttataatcgttcattaccacctctgttttaaattcgcgactagtgtaaagcggcaaacgaatggggtaaacatgcggattttttagtaaatatttcgagagggatatgtttctaatgctaagaaaaaaggtgccgtagcacctttttaatagagaggttttgttaccacacagcagccagcagcgtatgcgagtccggtaccataaaatcaacggacatcatcaccgagagggcagtgatggcgatgatagagaagccgaacagcttgcgcgcccagattctgtcatcagcaactttataaccgcgcagagccatacctaaccaccagacgctaaccgccgcggcgaccaccagatatttatacccagcgtaaccgccaagagagagcatcagcgtggcaacggcaaaggcgatgatatacagcgtgatgtgattcttcgccaccgaaatgccttttaccactggcaataccggaatgtttgccgcctggtaatccttaaagcggaaaatggcgatggcataggagtgaggcatctgccacaggctgaagatagccagcaggatcgctgcgccgctatcgaactcaccggttaccgcacagtagccgatcaccggcggcgcagcgccggagagcgaaccaatcaacgtgccgtagacagagtggcgtttcatgtacaggctataaacgccgacataaaccacaaagcccatcacccccagccagcaggccagcggattcgcgccaaaccacagcagcataaagccagcaatacccagcaacgtggcgtacaccagcgagacagcaggagagatcaggcctttcaccagcacccgattcttcgtcctttccatctttctgtcgatatccctgtcgatgtagttgttaaacacacaacccgacgccacaaccagtgacaccccaaccagcgtgtagataaacaggggataatcaatgctgccctttgaggccagcaggaatcccccaatcaccgagatcaggttgccaaagatgatgcctggtttcgttacttgcaggtattgcttaaacatcataaccgccgctcttagtgcatcatcatgttgtagttgaggttccacataatccagatggagcctacaaccaggatagcgatgattagcacggtgaagacaaacgccgtcatgttccagccttcatctgatttggtattcatgtgcaggaagcacaccagatgcaccagaacctgtaccactgccattgccaggattgttcccagaattacggccggagaggcagctcctgtcatcaccatccagaacggaatcaccgtcagaatgatcgacaggataaagcctgtcatgtaggtttttacgctgccatgggacgcgccgctgtgatcggtagaatgactcattacatcgcccccatcagataaacaacagtgaacacacagatccaaaccacatccaggaagtgccagaacaggctcaggcacatgatgcgggtacggttagtgctggtcaggccgcgacgggcgatttgcaccatcagcaccgccatccagataagaccagaagtgacgtgcagaccgtgcgtgccgaccagcgcaaagaacgctgacaggaagccgctgcgatccggacccatgccgttaacaatcaggtgatggaattcatagatttccatcccgataaatccggcaccaaacaaccaggtcaacgccagccaggagataacctggcttttgttgtttttgtacatggcgatagccgccatgccgtaggtgatggagctgaacaacagcaagaaagtttcaaccagaacgaacggcagttcgaaaatgtccttacctgtcgggccgcctgcggtgccgttcaccagaacggcataggtagcaaacaagatagagaacagaatgcagtcgctcatcaggtagatccaaaatccgaagattttggttccgcctgcatcgtggtgcccgtgttcgtgcgcgtgggcagtcgcgtgcgtcaaagtatcagttgccatttttcagccctgccttagtaatctcatcgaaatgctggttttccagtttttcgatttctgccaccggcacgtagtaatccacgtcctcgtcgaagcttttcacgatccaggtgatgatcatgcctgcgaagccaacaatcgccagccaccagatatgccagatcatggcgaaaccgaagatggtggagaaagctgcaatgacgatacctgcaccgctgtttttcggcatatgaatttcttcatagtggtcaggctttttatacgcttcgcctttctctttcatttcccagaatgcatcacgttcgtgaacgtgcggcactacggcaaagttatagaacggaggcggggaagaggttgcccactccagcgtacggccaccccacgggtcgccagtcaggtcacggttctggtcgcggtcgcgaatagaaacgtacatctgaataacgaggcagagaatacccagcgcaatcagtactgcaccgctggctgcaatcatcagcatggtgtggaactgcgggtcaatctgctggctcaaacgacgggtcatgcccatgaagcccagcgcatacagtggcataaaggcaacgaagaagccgatgatccagaaccagaacgcgcgtttaccccaggtttcgttcagtttgaaaccgaacgctttaggccaccagtaggtcatccctgcgaagcagccgaagaccacgccgccgatgatcacgttatggaagtgcgcaatcaggaacaggctgttatgcagaacgaagtccgcgcccggtacggccagcagcacgccagtcatcccgcccaccgagaaggtgacgataaaaccgatggtccacagcatcgcagaatggaacacgatgcggccctgatacatggtgaacagccagttgaagatcttcaccccggtcgggatggcgataatcattgtggtgataccaaagaaggcgtttacgttcgcgcccgcacccatcgtaaagaagtggtgcagccaaacgatgaacgacagcacggtgatacagacggttgcccataccagcgaggtataaccaaacagacgtttacgcgagaaggttgccgcaatttcggagaacacaccgaaaacaggcaggatcaggatgtaaacttccgggtggccccaggcccaaatcaggttgatgtacatcatcatgttgccacccatatcgttggtaaagaaatgggtgcccagatagcgatccagggtcaacaacgcgacggtaaccgtcagaattgggaaggaagcaataatcagtacgttcgcgcacagtgatgcccaggtaaatactggcatcttgaacatggtcatgcccggtgcgcgcatcttcagaatggtaacgaagaagttgataccggtaagcgtcgtacctataccggatagctggagactccatatccagtaatcgacaccgactcccggactgtactctattcccgatagcggtggataggccagccagccggtctgcgcaaattcgcccacgccgagagaaacgttaaccagaatcacaccaacaacggtaaaccagaagcttaagttgttgaggaacgggaacgcaacgtcacgcgcgccgatctgcagcggaaccaccaggttcatcagaccgataacgaaaggcatcgccacgaagaagatcataatcacgccgtgcgcggtaaagatctgatcgtagtggtgaggtggcaggaagcccgcttcgcccgccgaggcaagagcctgctggctacgcatcataatggcgtcagcaaaaccacgcagcaacatcacaatcgccacgatgatatacatgataccgaggcgtttatggtcgacggaggtcagccactctttccacaggtaggtccacttaccgaagtaagtgatcaggccaacgagcgccagacctcccaaaataatgccagcgatcgtaaccatgacgataggttcatggaacgggactgcatcaagtgataattttccgaacatctttattcttcctcaacccctttaatgggcggattccgcgtggctcatgtccatgccttccataccttcgtgtgcgctgtgctcaccttctggctgggtcatgtccatgctcttaccgtgagccataaacttgttaattacatcggcaaacaagtctggtttcacgttggagaaatattccacctggttgtattcgctaggcgcggccagtttttcgaacgcagccatgtcagacatggtgttcggcgactgcttcgcttttgcgacccactggtcgaatgcggcgcgatccggtgttgcaatagctttgaacttcatgcctgagaagcccgggccgctgtagctggcggagataccgtcataagtgccgggttcgttggcgatcagatgcaggcgagtctgcataccggccatggcataaatctggctacccagacgcggaatgaagaaggagttcatcacggagttggaggtcactttgaagtacaccggagtgttcgccgggaaagcgatttcattcacggtagcaatgccctgttccgggtagatgaagaaccatttccagtccatggaaaccacttcgatggtaatgggcttctcgtcgtgtgccagcggcttgctaggctcaagagcgtgagtggttttccaggtcagtactgcaaggaagatgatgattaagataggtaccgtccagaccacagcttccactttattggagtgtgaccagttcgggctgtacttagcatctttattgctcgcacggtacttccaggcgaaaccaacagccatcaagattgcgggaataacgacaatcaacatcaggccaaatgccgtcagtatcagtgaacgttgctccagaccaatctgtcctttgggatctaacagcgcagaattacagccactgagcaatacagtgcctgcaaataatgacaaccatcccaaacttttattgtatttcctgagtctcatttaacgacctcaattccacgggatctggtggcgtttaaagtgtgtgggcattttacgggaaggttacattactgtaaacatgattaaattcctgttacttggatttggctgccaggtcacatatgttgcaaaacatatcaggttgattttaagaagctgttgcaaaagggcgttataacaaaaggggagtgctgaaggagtctgggcgggcaattggtataaccaatgtgaaataaaacaattatttaacaaataattatcattagagtgacaactgggtgatgagaaaataaagactcattagctgaatcgtgtaagaaaaatagaatttataaatggcgccaataatttccaaacgctaagccgcacaaaagaacaaatattaataagcgatactgatgtttatttagccgtaataattacggcgagtgattactacagctaaataatatttacagattacgtcagatgcgtttttcgtagcgccagataatccagcaaaccaccaagcacgacgccagaaagggcgactaaaaccccgacttccagcagagcaggcaggaaagagaagtgcgtcaaatccagcgcgtccatcgtcaatagcagtaaccacacggccaacaggctgacgcccgccgccagtgtccacatggcaaaggcataacctgccggatatgcggtacgggagataaagttgtcatttactcgtgtatattcaagcgtctggcggcaaaccagcagcaaaataagccctggtacggcagcggcgacggagaatagatagaatgtcgaccagccgtgtgcttcaacaaaccaacccgccacggggccgacataaactcgccctacagcagaaagcgctgagagcagggcaaattgagtagcggaaaatgacttattacatagcgtcattaacagcgcgacaaaggctgatgtgcccatcccgccacagaggttttcgaaaaagacggctgcgcccatgctgtagagatgcttatcagtaatcgacagcagccagtaaccggcgttagacgcaccttgtaaaatgccgaaaatcagcagtgcccggaacagtgacaggcgctgcatcaaaatcccaccgtacaatgcgccaacaatggtcgctagtaagccaagcgttttgttaaccacgcctacttcacccgcatcaaacccgacgccgcgaatcaaaaacgtggttgtcaggctcatggcgaatgcgtcgcccagcttatacagcacgataagaagcaaaataagccaggcattattgcgaccaaagaaatctcgcagaggtgcaacaaccgcttgttccagcgttttgggcacaggaatggtgtcggttggttctggtgcaagcaacgtcgcgataatacaggggatcaacagtgccgccattaaccagtacatgccctgccagcccagccatttatctgccagccacagggctaggccgccggaaaccagcatccctaaacggtaacccagcacgctgattgccgcgcccgcaccacgttcttctgccggaagcacatcggttttccacgcatcgaagactatatcctgggaagcagagcaaaaagcgatcaccactgccagcgccgccatccagcggagttgggtgcctggttcgagaaaacccatcgccgcaatggcgactaataacaggatttgcgtggcgagcagccaaccgcgccgccgcccaaaaaatggaggcgtgtagcggtccatcagcggtgaccagaggaatttaaaaacgtaagcctggcctaccagagagaagaaaccaatggttttgagatcgatattctcgaccgtcatccaggcctgtaaggtaccggatgtcagggcgagcggtagcccggaagcaaaacccaggatcagcaatatggctgaacgcggctgttgaaaaatacgtaaatattgactggacatgggcgtctacaggcccggcttgcaccgggccagagggcagaaattaacgcgcgttctgcttgatgaattcgtggatgctggtgtcctgagacatatcagcgatggtatcggtcagcacactgttaaccgcatcggcgatatttttgttggaggcctggaacgcaccttcaacgttgtagctggcacgatagtttttggtcattttgttgccattctgcgcggtagcgatgatggcgatatccgctttggtcgcgatgttgtagcgcacgttgccctgggacacgtcagcatacagttggctaacgatgatttgcagattaaccgggccattcggaccaaccatgtaaccacgcgcggtcatctgtttttccagcacttcttgcagcaggaaacgcagatcgcgggaggcggtcagggtaacgatttgattatcgcgggtgacttttgccagcgcctgatcggtacgctgatcggcaccattaatgcttacggtgacgcccatcaggcttggatcctgctgtggcagtgtaatcgtcggggaaacttcaatagttgttggcggttttgcgcatcctgcaagcataaacagagcaactaacgggaagaggatttttttgaacatgttcgggctctcagagactcttaagcgtgtttggtaaaaattcccgccatcataacattgccaacggcgaggggaagtgggtaaggcatgtaaattcatcatgttgacgaaataatcgcccctggtaaaagaaacactgatgcgaggcctgtgtttcaatctttaaatcagtaaacttcatacgcttgacggaaaaaccaggacgaaacctaaatatttgttgttaagctgcaatggaaacggtaaaagcggctagtatttaaagggatggatgacatctcagcgttgtcggaggagatatttcatgatgatacgtgagcggatagaagaaaaattaagggcggcgttccaacccgtattcctcgaagtagtggatgaaagctatcgtcacaatgtcccagccggctctgaaagccattttaaagttgtgctggtcagcgatcgttttacgggtgaacgttttctgaatcgtcatcgaatgatttacagtactttagcggaggaactctctactaccgttcatgcgctggctctgcatacttacactattaaggagtgggaagggttgcaggacaccgtctttgcctctcctccctgtcgtggagcaggaagcatcgcgtaaaaacgcatttgcaactgtcggcgcttttccagtatgttgctaaagattttatgaaaaacggcctgcgggccgttttgttttgtctggattttgcgctttttgcccagcattcagacgaaaattgcccgggaattgtgaaaaaatacgcgacagcgcgcaataaccgttctcgactcataaaagtgatgccgctataatgccgcgtcctatttgaatgctttcgggatgattctggtaacagggaatgtgattgattataagaacatcccggttccgcgaagccaacaacctgtgcttgcggggtaagagttgaccgagcactgtgattttttgaggtaacaagatgcaagtttcagttgaaaccactcaaggccttggccgccgtgtaacgattactatcgctgctgacagcatcgagaccgctgttaaaagcgagctggtcaacgttgcgaaaaaagtacgtattgacggcttccgcaaaggcaaagtgccaatgaatatcgttgctcagcgttatggcgcgtctgtacgccaggacgttctgggtgacctgatgagccgtaacttcattgacgccatcattaaagaaaaaatcaatccggctggcgcaccgacttatgttccgggcgaatacaagctgggtgaagacttcacttactctgtagagtttgaagtttatccggaagttgaactgcagggtctggaagcgatcgaagttgaaaaaccgatcgttgaagtgaccgacgctgacgttgacggcatgctggatactctgcgtaaacagcaggcgacctggaaagaaaaagacggcgctgttgaagcagaagaccgcgtaaccatcgacttcaccggttctgtagacggcgaagagttcgaaggcggtaaagcgtctgatttcgtactggcgatgggccagggtcgtatgatcccgggctttgaagacggtatcaaaggccacaaagctggcgaagagttcaccatcgacgtgaccttcccggaagaataccacgcagaaaacctgaaaggtaaagcagcgaaattcgctatcaacctgaagaaagttgaagagcgtgaactgccggaactgactgcagaattcatcaaacgtttcggcgttgaagatggttccgtagaaggtctgcgcgctgaagtgcgtaaaaacatggagcgcgagctgaagagcgccatccgtaaccgcgttaagtctcaggcgatcgaaggtctggtaaaagctaacgacatcgacgtaccggctgcgctgatcgacagcgaaatcgacgttctgcgtcgccaggctgcacagcgtttcggtggcaacgaaaaacaagctctggaactgccgcgcgaactgttcgaagaacaggctaaacgccgcgtagttgttggcctgctgctgggcgaagttatccgcaccaacgagctgaaagctgacgaagagcgcgtgaaaggcctgatcgaagagatggcttctgcgtacgaagatccgaaagaagttatcgagttctacagcaaaaacaaagaactgatggacaacatgcgcaatgttgctctggaagaacaggctgttgaagctgtactggcgaaagcgaaagtgactgaaaaagaaaccactttcaacgagctgatgaaccagcaggcgtaatttacgcagcataacgcgctaaattcgcacaaaggcccgtcaccgccaggtggtgggcttttttttgtcatgaattttgcatggaaccgtgcgaaaagcctctttcggtgttagcgtaacaacaaaagattgttatgcttgaaatatggtgatgccgtacccataacacagggactagctgataatccgtccataaggttacaatcggtacagcaggttttttcaattttatccaggagacggaaatgtcatacagcggcgaacgagataactttgcaccccatatggcgctggtgccgatggtcattgaacagacctcacgcggtgagcgctcttttgatatctattctcgtctacttaaggaacgcgtcatttttctgactggccaggttgaagaccacatggctaacctgattgtggcgcagatgctgttcctggaagcggaaaacccagaaaaagatatctatctgtacattaactccccaggcggggtgatcactgccgggatgtctatctatgacaccatgcagtttatcaagcctgatgtcagcaccatctgtatgggccaggcggcctcgatgggcgctttcttgctgaccgcaggggcaaaaggtaaacgtttttgcctgccgaattcgcgcgtgatgattcaccaaccgttgggcggctaccagggccaggcgaccgatatcgaaattcatgcccgtgaaattctgaaagttaaagggcgcatgaatgaacttatggcgcttcatacgggtcaatcattagaacagattgaacgtgataccgagcgcgatcgcttcctttccgcccctgaagcggtggaatacggtctggtcgattcgattctgacccatcgtaattgatgccagaggcgcaactgtgccgctatacttatccagggcggcacaacgctgtaagcggcttgcgcctgagaatggcatttgcgtcgtcgtgtgcggcacaaagaacaaagaagaggttttgacccatgacagataaacgcaaagatggctcaggcaaattgctgtattgctctttttgcggcaaaagccagcatgaagtgcgcaagctgattgccggtccatccgtgtatatctgcgacgaatgtgttgatttatgtaacgacatcattcgcgaagagattaaagaagttgcaccgcatcgtgaacgcagtgcgctaccgacgccgcatgaaattcgcaaccacctggacgattacgttatcggccaggaacaggcgaaaaaagtgctggcggtcgcggtatacaaccattacaaacgtctgcgcaacggcgataccagcaatggcgtcgagttgggcaaaagtaacattctgctgatcggtccgaccggttccggtaaaacgctgctggctgaaacgctggcgcgcctgctggatgttccgttcaccatggccgacgcgactacactgaccgaagccggttatgtgggtgaagacgttgaaaacatcattcagaagctgttgcagaaatgcgactacgatgtccagaaagcacagcgtggtattgtctacatcgatgaaatcgacaagatttctcgtaagtcagacaacccgtccattacccgagacgtttccggtgaaggcgtacagcaggcactgttgaaactgatcgaaggtacggtagctgctgttccaccgcaaggtgggcgtaaacatccgcagcaggaattcttgcaggttgatacctctaagatcctgtttatttgtggcggtgcgtttgccggtctggataaagtgatttcccaccgtgtagaaaccggctccggcattggttttggcgcgacggtaaaagcgaagtccgacaaagcaagcgaaggcgagctgctggcgcaggttgaaccggaagatctgatcaagtttggtcttatccctgagtttattggtcgtctgccggttgtcgcaacgttgaatgaactgagcgaagaagctctgattcagatcctcaaagagccgaaaaacgccctgaccaagcagtatcaggcgctgtttaatctggaaggcgtggatctggaattccgtgacgaggcgctggatgctatcgctaagaaagcgatggcgcgtaaaaccggtgcccgtggcctgcgttccatcgtagaagccgcactgctcgataccatgtacgatctgccgtccatggaagacgtcgaaaaagtggttatcgacgagtcggtaattgatggtcaaagcaaaccgttgctgatttatggcaagccggaagcgcaacaggcatctggtgaataattaaccattcccatacaattagttaaccaaaaaggggggattttatctcccctttaatttttcctctattctcggcgttgaatgtgggggaaacatccccatatactgacgtacatgttaatagatggcgtgaagcacagtcgtgtcatctgattacctggcggaaattaaactaagagagagctctatgaatcctgagcgttctgaacgcattgaaatccccgtattgccgctgcgcgatgtggtggtttatccgcacatggtcatccccttatttgtcgggcgggaaaaatctatccgttgtctggaagcggcgatggaccatgataaaaaaattatgctggtcgcgcagaaagaagcttcaacggatgagccgggtgtaaacgatcttttcaccgtcgggaccgtggcctctatattgcagatgctgaaactgcctgacggcaccgtcaaagtgctggtcgaggggttacagcgcgcgcgtatttctgcgctctctgacaatggcgaacacttttctgcgaaggcggagtatctggagtcgccgaccattgatgagcgggaacaggaagtgctggtgcgtactgcaatcagccagttcgaaggctacatcaagctgaacaaaaaaatcccaccagaagtgctgacgtcgctgaatagcatcgacgatccggcgcgtctggcggataccattgctgcacatatgccgctgaaactggctgacaaacagtctgttctggagatgtccgacgttaacgaacgtctggaatatctgatggcaatgatggaatcggaaatcgatctgctgcaggttgagaaacgcattcgcaaccgcgttaaaaagcagatggagaaatcccagcgtgagtactatctgaacgagcaaatgaaagctattcagaaagaactcggtgaaatggacgacgcgccggacgaaaacgaagccctgaagcgcaaaatcgacgcggcgaagatgccgaaagaggcaaaagagaaagcggaagcagagttgcagaagctgaaaatgatgtctccgatgtcggcagaagcgaccgtagtgcgtggttatatcgactggatggtacaggtgccgtggaatgcgcgtagcaaggtcaaaaaagacctgcgtcaggcgcaggaaatccttgataccgaccattatggtctggagcgcgtgaaagatcgaatccttgagtatcttgcggttcaaagccgtgtcaacaaaatcaagggaccgatcctctgcctggtagggccgccgggggtaggtaaaacctctcttggtcagtccattgccaaagccaccgggcgtaaatatgtccgtatggcgctgggcggcgtgcgtgatgaagcggaaatccgtggtcaccgccgtacttacatcggttctatgccgggtaaactgatccagaaaatggcgaaagtgggcgtgaaaaacccgctgttcctgctcgatgagatcgacaaaatgtcttctgacatgcgtggcgatccggcctctgcactgcttgaagtgctggatccagagcagaacgtagcgttcagcgaccactacctggaagtggattacgatctcagcgacgtgatgtttgtcgcgacgtcgaactccatgaacattccggcaccgctgctggatcgtatggaagtgattcgcctctccggttataccgaagatgaaaaactgaacatcgccaaacgtcacctgctgccgaagcagattgaacgtaatgcactgaaaaaaggtgagctgaccgtcgacgatagcgccattatcggcattattcgttactacacccgtgaggcgggcgtgcgtggtctggagcgtgaaatctccaaactgtgtcgcaaagcggttaagcagttactgctcgataagtcattaaaacatatcgaaattaacggcgataacctgcatgactatctcggtgttcagcgtttcgactatggtcgcgcggataacgaaaaccgtgtcggtcaggtaaccggtctggcgtggacggaagtgggcggtgacttgctgaccattgaaaccgcatgtgttccgggtaaaggcaaactgacctataccggttcgctcggcgaagtgatgcaggagtccattcaggcggcgttaacggtggttcgtgcgcgtgcggaaaaactggggatcaaccctgatttttacgaaaaacgtgacatccacgtccacgtaccggaaggtgcgacgccgaaagatggtccgagtgccggtattgctatgtgcaccgcgctggtttcttgcctgaccggtaacccggttcgtgccgatgtggcaatgaccggtgagatcactctgcgtggtcaggtactgccgatcggtggtttgaaagaaaaactcctggcagcgcatcgcggcgggattaaaacagtgctaattccgttcgaaaataaacgcgatctggaagagattcctgacaacgtaattgccgatctggacattcatcctgtgaagcgcattgaggaagttctgactctggcgctgcaaaatgaaccgtctggtatgcaggttgtgactgcaaaatagtgacctcgcgcaaaatgcactaataaaaacagggctggcaggctaattcgggcttgccagcctttttttgtctcgctaagttagatggcggatcgggcttgcccttattaaggggtgttgtaaggggatggctggcctgatataactgctgcgcgttcgtaccttgaaggattcaagtgcgatataaattataaagaggaagagaagagtgaataaatctcaattgatcgacaagattgctgcaggggctgatatctctaaagctgcggctggccgtgcgttagatgctattattgcttccgtaactgaatctctgaaagaaggggatgatgtagcactggtaggttttggtacttttgccgttaaagagcgtgctgcccgtactggccgcaacccgcagaccggtaaagagatcaccatcgctgctgctaaagtaccgagcttccgtgcaggtaaagcactgaaagacgcggtaaactaagcgttgtccccagtggggatgtgacgaagttcaagggcgcatctactgatgtgccttttttatttgtattcggtgactttctgcgtcttgtgggctgacaattgcccccgtttcttgtcacaataggcctttgcgcgcatcgatacgttgcgtgaggtacacagtcatctacagcggagtgttgttacaccatgatggacagcttacgcacggctgcaaacagtctcgtgctcaagattattttcggtatcattatcgtgtcgttcatattgaccggcgtgagtggttacctgattggcggaggcaataactacgccgcaaaagtgaatgaccaggaaatcagccgtgggcaattcgagaacgccttcaacagcgagcgtaatcgcatgcagcaacagctgggcgatcaatactccgagctggcagcgaacgaaggctatatgaaaaccctgcgtcaacaggtgctgaatcgtctgatcgacgaggcgctgctggatcagtacgcacgtgagctgaaactgggtatcagcgatgagcaggttaaacaggcgattttcgcgaccccagccttccaggttgacggcaaatttgataacagccgctataacggtatcctcaaccagatggggatgaccgccgatcagtacgcccaggcgctgcgtaaccagctcactacccaacagctgattaacggcgttgccggtaccgattttatgctgaaaggtgaaaccgacgagctggcggcactggtcgcgcaacaacgcgtggtgcgtgaggcgactatcgatgttaacgcgctggcggcgaagcagcctgtgaccgaacaggagattgccagctactacgaacaaaacaaaaacaatttcatgacgccggaacaattccgcgtgagttacatcaagctggatgccgcaacgatgcagcaaccggttagcgatgcggatatccagagctactacgaccagcatcaggatcaattcacccagccgcagcgtacccgctacagcatcatccagaccaaaactgaagatgaagcgaaagcggtacttgatgagctgaataaaggcggtgattttgctgcattagccaaagaaaaatctgccgatattatctctgctcgtaacggcggcgatatgggttggttagaagatgccactatcccggacgaactgaaaaatgctggtctgaaagaaaaaggccaactgtctggtgtcatcaaatcttcggtcggtttcctgattgtacgtctggacgacattcagccagcgaaagtgaaatcgttagacgaagtacgtgacgacattgcggcgaaagtgaaacacgaaaaagccctcgatgcgtactacgcgctgcagcagaaagtgagcgatgcggcaagcaacgacaccgagtctctggccggtgcagagcaagctgccggcgttaaagccactcagacgggttggttcagcaaagataacctgccggaagagttgaacttcaagccggttgccgacgctatctttaacggcggtctggtaggtgaaaacggcgcgccgggcatcaactctgacatcatcaccgtagacggcgaccgcgcattcgtgctgcgcatcagcgagcacaaaccggaagcggtgaaaccgttggcagatgttcaggaacaagttaaggcattggttcagcacaacaaagctgaacaacaggcgaaagtggatgctgagaaactgctggttgatttgaaagccggcaaaggtgcggaagctatgcaggctgccggtctgaaatttggcgagccgaaaaccttaagccgttccggtcgtgacccgattagccaggcggcgtttgcactgccactgccagcgaaagacaaaccgagctacggtatggcgaccgatatgcaaggtaatgtggttctgctggcgctggatgaagtgaaacaaggttcaatgccggaagatcagaaaaaagcgatggtgcagggtatcacccagaacaacgcacaaatcgtctttgaagctctgatgagtaacctgcgtaaagaggcgaaaatcaaaattggcgatgcgctggaacagcaataatcctgaagccgcctcgcaaaaaaatgcgttgcagctgtaacaagaaaaggtcgctttcgcggccttttccatttctgaacattgccatttgtttactgttttcactgccgttaaggtgattccactgttaacaaacaaggagaaaacagtatgaaacacggaattaaagcactgctcattaccctgtccctggcctgtgccggaatgtctcatagcgcgctggcggcagcttctgtggcgaaaccgacggcggtagaaaccaaagcggaagctcctgcagcacaaagtaaagcagcagtaccggcgaaagccagtgacgaagaaggcacccgggtcagcattaataatgccagcgcggaagagctagcccgcgcgatgaatggcgttggcctgaagaaagcgcaggcgattgtcagttatcgcgaagagtacggtccgtttaaaactgtggaggatctaaagcaggtgccggggatgggcaattcgctggtggaacgtaatctggcggtattaaccctgtaattaatttgcatagtggcaattttttgccagactgaagaggtcataccagttatgacctctgtacttataacaacaacgtaaggttattgcgctatgcaaacacaaatcaaagttcgtggatatcatctcgacgtttaccagcacgtcaacaacgcccgctaccttgaatttctcgaagaagcccgctgggatgggttggaaaatagcgacagttttcagtggatgacggcccataacatcgccttcgtcgtggtcaatatcaatattaactatcgtcgcccagcggtattaagtgacctgttaactattaccagtcagttgcagcaattaaacggtaaaagcggcatcttaagccaggtcattacactggagccggaagggcaggtggtagcggatgcgcttattacgtttgtttgtattgatcttaaaacgcagaaagcattagctctggaaggggaattgcgcgaaaagctggagcagatggttaagtaaacgttttgtggtgccggatgctcaagccgcatccggcgacacccggaataattacctcaacccggttttctgcttcatcgctgccatcaccgtcggtttatcggccagataatgattcaaaccgttggcgcgtaaattacatgccgcacaatgaccgcaaccgtcgcctttaaagccgttatagcaggtcaacgtttcgttacggactaaatccagtttgccgtaataatctgccagcgcccaggtttccgctttatcaatccacatcagcggcgtttcaaaacgaatatctttcgccatgcccaaactgacggcatggtttagtgctttcacaaactcatcgcggcaatccgggtagccggagaaatccgtttcgcagacgccagtaattacggcttctgcttttacctgatacgcatatattgccgccagcgtcaggaacaaaatattacgccctgggacaaacgtattcgggataccatcggcttcaggttcataatcaggcaccggaatgctgtcacgcgtcaggctactgaccgccagctcgttgagcagggtgacatccagcaccttatgcgcgcgtgcccccagtttcagcgccagttcgcgtgccacgtcgatttctgcgcgatgccgctgaccgtaatcgaacgtcacgcaatggacttcatcatattgttgtaatgcctgcaccagacaggtggtggaatcctgacctccactgaacacaacgacagcacgtttcatagataatcctgcttgaacaataaaagcgttatggtaacgcctgcgattaacccggaccagctattcattgcgatggcgcgggaagccaggcttcggtaaattcaaaccagccgcgcggtgtcagtcgcacaccgttcacgccgggaggggcactaatgcgatagtgatagttgaacagcggcgtcagcgtcgcatctgtcattaactggctaaaaaccgctttcagggcattaaatcggttttcttcatcaggcattatttgcacggcatccagtgtcgattgtagatgtgcgtatgctggagcgtcgaaaacatgtggccacagcggatcgcagcgcagccattgctccagagtatattccggtgcttcgccaattaatctgtcgcccatcatgaggtctgcgtgtgcctgtagggtcgtgtcgtcccagttttttgcgttatgaaaaataattgtgagttcacagccttccgctgccagtgtcgcctgtaggcgttctgccatggtatgaagttctatcggtaggtgataaaccagcgtcaaggttttcggtagtttgacttcatccggtacctgccaatgcggaatagtccagcctggcagtaatgcatgactggcggtgatcaggttttctccgacttctaacgtttgtaataaaccggattgatgaataatggagatcacttttcgcgcctgccagagggagagtcggggacttttgcgcaacgtcaaatagcaaaaacctaaactgatgccgctactgacctggctgacccgttgcagctcctccggtttgccgatggtgatttgcacgggatgccgacaactggttcccaaatctttttcgaaaagcggcggagttatccagtactcaaccgctttaagcagcggatgacgtaaatggtaataatcatggctttccaggcgcaccagctctgctgtgaattgtgttaagcgaaaaggacccgtgccgatcagtgggaattgcggatgcgccagatggctgcaatagctcgccagccggtgcgcaagccagtaatcagggcgatgtaaaaagaaggtcagacactgcggatgggtgacttcaatacgcttcacgctaataaataattgatccagtgctggcagttgtaacagcatcaataatcgctggtgtaagtgtgaggcttttactgcatcgccgttatgccagtgtagggttgaacgaagataaaagtcccagcgtaacccgtcagtagaggtttcccagtgatgcgctaaatcgccaatcgggcgctgagtattattatcgaagcgggtcaggccggaaaatatctgcccggcgagatgctgctcggcacggccgggcaaaaagcctggttgtagcggttcgagcgggcgatagtagggaatacgcaacgtgggtgtatcgttttgccattgtccgcccataaacggctgtaacagagtgcgcagctcacctggggccagttgcgccagctccagcacatcttgctgctttccggtttccagtgcctgttccatcatcgcattgcgtagcgattccggcgtgaccagaaagcgtaattgtccgcgctttccgcgtcctgactgcgcctgccactccagccatcccgcctcctgtgcctgacgcaacagcgtacgaacatggcgttcgctgcaaaaacagcgttcggccagttcgctgacggtgacggtttgcggctttccggcggaaggttgccacagacgttgatactggttaagacggttgagcaatcgcatataaacccggaacaatattatttaactattcactattacttccgtatatatcaggtgatactcaatcaccattaaccgtgtcacagagtggagaaagaaatggctcgtctggcagcatttgatatggatggcactttattgatgcccgaccatcatttaggtgagaaaaccctctctactttggcgcgactgcgtgaacgcgacattaccctcacttttgccacggggcgtcatgcgctggagatgcagcatattctcggggcgctatcgctggatgcgtatttgattaccggcaacggaacgcgcgtgcattctctggaaggtgaacttttacatcgtgatgatttacctgcggatgtcgcggagctggtgctgtatcagcaatgggatacccgagccagcatgcatatcttcaatgacgacggttggtttaccgggaaagagatccctgcgttgttgcaggcatttgtctatagcggttttcgttatcagataatcgatgtcaaaaaaatgccactcggcagcgtcaccaagatctgcttctgtggcgatcacgacgatcttacacgcttgcagatccagctatacgaagcattaggcgagcgtgcacatttgtgtttttccgccacggattgcctcgaagtgctgccggtgggctgcaataaaggcgctgcattgacggtgctgacccaacatttaggtttatcgttgcgcgattgcatggcctttggtgatgcgatgaacgatcgcgaaatgttagtcagcgtcggtagcggatttattatgggcaatgcgatgccgcaactgcgcgcggagctcccgcatttaccggtgattggacattgccgaaatcaggctgtctctcactatttgacgcactggctggactatccacatctaccttattcccccgaataacgagatcccttccagcaccgggcaattgcccggttttttttgcgttgaatttgtcattttgtgccgtggtgtttaaaccgcacagaataaattgtcgtgatttcacctttaaaataaaattaaaagagaaaaaaattctctgtggaagggctatgttagataaaattgaccgtaagctgctggccttactgcagcaggattgcaccctctctttgcaggcactggctgaagccgttaatctgacaaccaccccttgctggaagcgcctgaaacggctggaggacgacggtatccttatcggcaaagtcgccctgctggatccggaaaaaataggcctcggcctgaccgcttttgtgctgataaaaacgcaacatcacagcagcgaatggtattgccgctttgtcacggtggttaccgaaatgccagaagtgctggggttctggcgcatggctggtgaatacgattatctgatgcgcgtccaggttgccgacatgaaacgctacgacgagttttataagcgtctggtaaacagcgtgccggggctgtcggacgtcacttccagcttcgcgatggaacagattaaatacaccacttctttacccatcgaataaatatccagaatcaggtcaggacacaacgcgtgcgattatttgctcaattaagctggtatttccgtcgggaatggcgtcgctatctcggggctgtcgccttgcttgtcattatcgcgatgctgcaactggttccgccaaaagtggttggtattgttgtcgatggcgtgacagaacaacactttactaccgggcagatcctgatgtggatcgccaccatggtgctgattgccgttgtggtttatctcctgcgttacgtctggcgggtattgctgtttggtgcgtcttatcaactggctgttgaactgcgtgaagattattaccgtcagctaagccggcagcatcctgagttttacctgcgtcatcgcaccggtgacctcatggctcgtgcgaccaatgacgtcgatcgcgtcgtgtttgccgccggagaaggggtgctgacgctggtggattcactggtgatgggctgcgctgtgttgattatgatgtctacgcaaattagctggcagttgaccttattttccctgttgccgatgccagtgatggcgatcatgattaagcgcaacggcgatgctttgcatgaacgctttaagctggcacaggcggcgttttccagtcttaatgaccgcacccaggaaagcctcaccagtatccgcatgatcaaagcctttggtctggaagatcgccagtcggcgttatttgccgcggatgccgaagataccggcaaaaaaaacatgcgggtggcgcgtattgatgctcgtttcgacccgaccatctatatcgcgattggtatggcgaacttgctggcgattggcggcggtagttggatggtggtgcagggcagtttaacgctgggccagctcaccagttttatgatgtatttaggtctgatgatttggccaatgctggcgctggcatggatgtttaacattgtggaacgtggtagtgctgcgtacagccgtattcgcgcgatgctggcggaagcgccggtggtgaacgatggtagcgaacccgtgccggaagggcgtggcgaactggatgtaaatattcaccagttcacgtatccgcagactgaccatcctgcgctggaaaacgtcaatttcgccctgaaacccggtcagatgctgggtatctgcgggccgactggttccggcaaaagtaccctgttgtcgctcattcagcgtcatttcgacgtcagcgagggggatattcgctttcatgatattcctctgacgaagttacaactcgatagctggcgtagccgcctggcggtagttagccagacgccattccttttttctgacactgtggcgaataacatcgcgctgggttgcccgaatgccacccagcaagagattgagcatgtcgcgcggttagccagcgtacatgacgatattttgcgtctaccgcaaggttacgatacagaggtgggcgagcgcggtgtgatgctttccggcgggcaaaaacagcgtatctccattgctcgtgcgttattagtcaacgcggaaatcctcatccttgatgatgcgctttcggcggtggacggacgcactgagcaccagatcctgcataacctgcgtcagtgggggcagggaagaacggtaatcatcagtgcccatcgcctttctgcactgacggaagccagtgaaattattgtgatgcagcacggacatatcgcccagcgtggcaatcatgatgtgctggcacaacaaagcggctggtatcgcgatatgtatcgctatcaacaactggaggcggcgctcgacgacgctccggaaaatcgcgaggaggccgtcgatgcgtagttttagccaactgtggccgactctcaagcgcctgttagcgtacggttcgccgtggcgtaaaccgctggggattgcggtcctgatgatgtgggttgcggcggcggcagaagtcagtgggccgctgcttatcagctattttatcgacaatatggtagcgaaaaataacctgccgttgaaagtggttgcagggctggctgcggcgtatgttgggctgcaactgtttgccgccgggctacattacgcgcagtcgctgctgtttaatcgggcggcagtaggcgtagtgcaacagttgcgtaccgacgtgatggatgctgcgttacgccagccattaagcgagtttgatacccaacccgtcgggcaggtgatttcccgcgtcactaatgacactgaagtgatccgcgatctctacgttaccgtagtggcaactgtcctgcgcagtgccgcgctggtgggcgcgatgctggtggcgatgttcagcctcgactggcgaatggcactggtggcgataatgattttcccggtggtgctggtggtaatggtgatataccagcgttacagcacgccgattgtccgtcgtgtgcgcgcctatttggcggatatcaacgacggctttaacgaaatcatcaatggcatgagcgttatccagcagtttcgtcagcaggcgcgatttggcgaacgtatgggggaggccagtcgttcacactatatggcgaggatgcaaaccctgcgcctcgacggttttctgctgcgtccgctgctgagtctgttttcatcgctcattctttgtggcttgttgatgctgtttggcttctccgccagcggcaccattgaagtgggcgtgctgtatgcgtttatcagctatcttgggcgacttaacgaaccattaatcgaactgaccacgcaacaggcgatgctgcaacaggctgttgttgctggtgagcgcgtgtttgaactgatggacggaccgcgccagcaatatggcaatgatgatcgcccgttacagagtggcaccatcgaagtcgataacgtgtcatttgcttatcgcgatgacaatctggtgctaaagaacattaatctctctgtgccttcgcgcaattttgtggcgctggtcgggcataccggcagtggcaaaagcaccctcgccagtttattgatgggctattacccgctaacggaaggtgagattcgccttgatggtcgtccattaagttcgctaagtcacagcgcgctgcgccagggcgtggcaatggtgcagcaagatccggtggtgctggcggataccttcctcgccaacgtgacgctggggcgggatatctccgaagaacgcgtctggcaggcgctggaaaccgtgcaactggcggagctggcgcgtagcatgagcgacggtatttacacgccgctgggcgagcaggggaataatctctcagttgggcaaaagcaactgctggcactggcgcgcgtgctggtcgagacgccgcaaatcctgatccttgatgaggcaaccgccagcattgactccggtactgaacaggcgattcaacatgctctggcggcggtgcgtgaacataccacgctggtagtgattgctcaccgcttatcgaccattgttgatgccgacaccattctggtgcttcatcgtgggcaagccgtggagcagggcactcaccagcaactgctggcggcccagggacgctactggcagatgtatcaactgcaacttgcgggcgaagagctggcagccagcgtgcgtgaagaggaatcattgagcgcctgaatagcgcaatatttcatcgttggtgcaaaaatgtaacgcactgtgcactgtcatagtgcgttttcattttcaaacttcttaacttcctgctctctttctcgtttttcatttctggcacaccgcttgcaataccttcttcgtgtagcagaaccattaccgaattctgaccggaggggatctatgaagctggtgaccgtgataatcaaaccattcaagctggaagacgttcgtgaagcgttatcttccattggtattcagggcctgaccgtcaccgaagtgaaaggtttcgggcgtcagaaagggcatgccgagctgtaccggggggcggaatacagcgtcaatttcctgccaaaagtaaaaattgatgtggcgattgctgatgaccaactcgatgaagtgatcgatatcgtcagtaaggcggcttacaccggaaaaattggcgacggcaaaatcttcgtcgctgaattgcaacgcgtcattcgtattcgtaccggcgaagccgacgaagcggcgctgtaatctctggcacacagcaacaggaacgaaaaatgaagatagcgacgataaaaactgggcttgcttcactggcgatgcttccgggactggtaatggctgcacctgcggtggccgataaagccgacaatgcgtttatgatgatttgtactgcgctggtgctgtttatgactattccggggattgccctgttttacggtgggttgattcgcggcaaaaacgtgctgtcgatgctgacgcaggtgacggtgacatttgcactggtctgtattctctgggtggtttacggttactcgctggcgtttggtgagggcaacaacttcttcggcaacattaactggttgatgctgaaaaacatcgaactgacggcggtgatgggcagcatttatcagtatatccacgtggcgtttcagggatcgtttgcctgcattaccgtcggcttgatagttggggcgctggcggaacgaatccgcttctcagctgtgttgattttcgtggtggtatggctgacgctctcttacattccgattgcgcatatggtgtggggcggtggtttgctggcttctcacggtgcgctggatttcgcgggtggcaccgtggtgcacattaacgccgcaatcgccggtctggtgggcgcgtatctgataggaaaacgcgtgggcttcggtaaagaggcgtttaaaccgcacaacctgccgatggtcttcaccgggactgccattctctatatcggttggtttggctttaacgccgggtcagcgggcacggcgaatgaaatcgcggcactggcatttgtgaatactgtggtcgcaacggcggcggcaattcttggctggatcttcggtgaatgggcgctgcgtggtaagccttcactgctgggggcgtgttctggcgcgattgccggtctggtcggcgtgacgccagcctgcggctacattggggttggcggcgcgttgattatcggcgtggtagctggtctggcgggcttgtggggcgttaccatgctcaaacgcttgctgcgggtggatgatccctgcgatgtcttcggtgtgcacggcgtttgtggcattgtcggctgtatcatgaccgggatttttgccgccagctcgctgggcggcgtgggcttcgctgaaggtgtgacgatgggccatcagttgctggtacagctggaaagcatcgccattacgatcgtctggtccggtgttgtggcatttatcggctacaaattggcggatctgacggttggtctgcgtgtaccggaagagcaggagcgagaagggctggatgtcaacagccacggcgagaatgcctataacgcgtaacaagcactgcaaaaaacagccggacggttttcacctccggctatttttttaattgtgattacgcatcaccccttcctgaacggtcgaggcaaccagtacgccgtcttgggtataaaactcaccgcgcacaaagccacgtgcgctggacgccgaggtgctctccacgctatacagcagccattcattcaaattaaacgggcgatggaaccacatggaatggtcaatggtggcaatctgaatccccggttcgagaaaaccgatgccgtgcggctgtagagctaccggcaggaagttaagatcagaagcgtaaccgagcagatactgatgaacgcgcaggtcatccggcacgctaccatttgcgcggatccacacctgacgatgtggttctgcgacgtgacctttcagtgggttatgaaactccaccggacggacttccagcggacgatcgcagatgaatttatctttcagcactggcggcagcaggtgcgccagcgattgggcgatttgcgtttccgaagggaggccatcaggcgctggcgcggacggcattgttttttgatgttcgaaacccgcttctggtgcctggaaagaggcagtcatataaaaaatcggtttgccgttttgaatagcagcaacccggcgggcgctgaagctgttaccgtcacgcagcgtttcgacatcataaataatcggcttcttactatcgccagggcgaagaaagtagctgtgaaacgaatgtaccagccgctcttcagggacggtctcttttgcagcatacaaggcctgacccacgacctggccgccaaacacctggcgtaaacctaaatcttcactctggccgcgaaagagtccttcctcaattttttccagatttaacaatgtcagtaaattttttagcgcctgactcatataactctccagtaacaaagctgccgcagcaagccaaagtgagttgagtataacgcaaatttgctactggtccgatgggtgcaatggtctgaattacgggctaattacaggcagaaatgcgtgatgtgtgccacacttgttgacgttactattttgttaaccactcttccggcgaggaaagttagcccgctggtgcattgataataaggagaaatgaatgaaactcgtgcacatggccagtggtttagcggttgcgattgcgttggcggcttgcgcagataaaagcgcggatattcagacgccagcaccggctgcaaatacgtctatttcagcaacacaacaaccagctatccagcaaccgaatgtctccggtaccgtctggatccgtcagaaagtcgcactgccgcctgatgctgtgctgaccgtgacactttctgacgcgtcgttagccgatgcaccgtcaaaagtgctggcgcagaaagcggtgcgtactgaaggtaaacagtcaccattcagctttgttctgtcatttaacccggcagatgttcagccgaacgcgcgtattctgttgagtgcggcgattaccgtgaatgacaaactggtatttatcaccgataccgttcagccggtgatcaaccagggcggaactaaagccgacctgacattggtgccggtacagcaaaccgccgtgccggttcaggccagcggtggcgcaacgactaccgtaccttcgacttcaccaactcaggtgaatccgtcttcggcagttccagctcctacgcaatattaagcgacgttaaccctctccgcccggagagggttagtagttccagcgataacgctgcaagtcgatttgcccgcttcccgataccatcacaccttctgccagtaatgcctgtcgctgacgctgtaaatccggtccggttagcgaaattgtgccgtggcgattaaccacccggtgccagggtaaggtgctgccttcagggagacgctttaacacaccgcccacctggcgcgcggcgcggggcgatcccgccagtttcgccacatcaccgtaagtggtgacatagccttcgggaatagcggcgacgatttgccagacgcgttggggaaatgaatcttctttttccatcttttcttcctgaggtaatttttcagcataatctggaaaaacgcccgagtgaagtcgcattgcgcaagaaaccagcatctggcacgcgatgggttgcaattagccggggcagcagtgataatgcgcctgcgcgttggttctcaacgctctcaatgggggctctgttggttctcccgcaacgctactctgtttaccaggtcaggtccggaaggaagcagccaaggcagatgacgcgtgtgccgggatgtagctggcagggcccccacccatttctgcctcccaccgtttcgtcaaaaaatcccaacatggctaaactttaaccacaactgacgtcgcaagaattgtctggctgcgcagtacgcttcggaggtatgtctgatgaagtatgttgatggttttgtggttgccgttcctgccgataaaaaggatgcctatcgggaaatggccgctaaggctgcgccattgtttaaagagtttggcgcgcttcgtattgtcgaatgctgggccagcgatgtaccggatggcaaagtgaccgattttcgtatggcggtgaaagcggaagagaatgaagaggttgtctttagctggattgaatacccttcaaaagaggtccgcgacgctgctaatcaaaagatgatgtcggacccacggatgaaagagttcggcgagtccatgccgtttgacggcaagcgaatgatctatggcggattcgagtcaatcatcgacgaataggtagcgtgacgggctgtgcggcgtgccgtcagcccaaaaattcacaaatgttgctcggcccagcgtaagaaatcttctttcggtaatgccttgctgtagagccagccctgaccgtagtgcacgccatgctggcgtaaccactcttcttgtttactggtttcgattccctccgctaccattttcagtttcagtgtttttgccatttcgatgatatgcggcgtgacatttttatattccagcgcatcaacgaaagatttatcgatcttcagaatgtcgacatccagatcctgtaaataacttaaacttgaataccccgtaccaaaatcatcaagataaatttcatggcccgcctcccggtagcgagaaattatcggggcgctggttttcggatcggcaaactcgcgttcagtgagttcaagcgcgatctgtctgggattaacctgatagtgattgatcatgtcacgcagcaattgcgggattttttccgaggtgagcacgggggattcaagattgatcgaaatatgctgctgtggatgctgacgcagccagtcgcccatatcttcaaagacgcttcttataatcagtagcgtcaatggctcagaaaggcccgtttgctgtgccagcggaataaaactatctggtgacaaccaactaccgtctgtctgcggccagcgcgccagtgcctcagcaccgacaattttgccattggctaaggagacaatcggctgatagtgcacgcaaatatcacgattttcgatagcatcctgcagccgatgatgcggtgactgaatacggcgcaaaatacgcagcacaaacatcgctgccagcaggccaatcaccaacccgagcggtaaccaaataaagacttgccgatgccagcctttctgcaacattttcgttgaagcccatgtgatgatcgaaatattcatctccggtaagggcaggatatcgtaaatgattccattattttcgatatgctcaccgggtgttttttgtagcctggtaataattccctgagcaatttcatcgctgctggttatgacaacgttatgggcattgccaataatggcggcatcaatttgccatgagctatagggaatgacatcaataaaggaagcggggtcgatcatgacgacataatgtgccgttcccatggcgaccatgtaacggataatgcctaaatcgttatgcgatgttaaccagacacgataaccatctttcgaaattttacctggctcggggaaggtatcgggcggactttcatgctccagagacgaacactggggaacgttgttatcgatataagccacttcctgaatatagcgataactgtaagatacccgacgcatttccatgagatgggcttcgctacaggcagcgccttgccatctttccagctcctgcagcgcatctttcccttgtgtcgccaccttattggctcgaatagcgacgcgggaggaataggtatccagctcttcaataaacgatgtttctacctgctgatgggccagccagatgcttaagccgacaggcagcaatactgaaagaatcagtactcccgaaataaggccgaccagatgtcgtgttctcaccagcatatccttattaacacagtgtagggaaagtatatctgattgtggaaaaaggctggctggagataaggaggtagagctggtatttcatgaagtgatgggtggaaacgatcattgtcatttgaccaggcgcagagctttacgcctggtatgtaaccctaacttaagatgttgattcggcgcgagcgagggtaaaaatatcgtaaaaagacagttcacctttacggacgatcattttttgcagttgttccttatgaacatccgcgacacgcggagagttcaagatggcttcaaccagcgcggcaggtacaaagcgcgtgttgtaccattcgccgttatagcaaacgcggaaatccagcacgtcgatatcttcatagcggtagcgtgggtagacatcgaaaaagaagaaaccattaagcaggataaataatacaaccagtagccagacagagcctgacagcgtttcggactgcaacatcaccgccagggtggcaaaaaaagcaacgtacataccgataaacagccccggatgtttacggataaaactgatactaaagcggggtttgttgtcgcgtttttcgcgggtattcagagactcaatcgtttcggtcagcaggcgttgtatttcggtcatcgtttgccttcgtggtatctgcaactttccagggaacaccctattttaacgtgggaatagtagaggggaagtaacagatctaccacaattttgcataacagttgcgaaaaaccgattacaattttttaattattctggctggattaccgcccacgacaacgttgtccgggacatcttttgtgacaactgcacctgaggctaccacgacgttatcaccaatggtcacaccagggttaatgaccgcgcgtccgccaatccagacgttattaccgatggtgacgggtttccccagttcagcaccgctattacgtgctacagggtcgatgggatgtgttgccgtgtagatatgaacgcctggtgccaacatacagttatcaccgatgcgaatagggcagacatcaagcatcacgcaatcgaagttggcgaaaaaattattaccgagaaaaatgttatagccatagtcacagcgaaacgttggctcaatataagcctctgtcacctgaccgaatagatcagcgagaatttgctggcgtaatgtgtgctcttccgccagggaatgattgtatcggtgaataagctgacgagcgcgcaggcgatcgcgagataacgtctcatctgccgagcgatacaactcaccagcaatcatcttttctttttctgtgctcattactgacctccggttgctgaaaatgcggcaacacagtaagacgaaaagtcagtgaagagaacgttcccattacatctgtgtgataaagatcacatagggtatgtcttcatggcgaaaaagtataaaattcttaataaacagccggttatagctccgaaagcgaattatttattagcgaataaatttccatactgaggaagggatcttgtcgtacagtttattcatggtcaattcggcgaggcggtgatctgcggctgagtaaaataccgccagttcattatctgataattcgtatttatttttctcgataacacgctccagcgtgtcaattgtctggcaacgacgtaaacgcattaaataatcggttttcgttaaaggtttttcggacatacttctacctatggttgtaataattctaacaagataaactcgcaggattctctttcgtcgcattgacaaaacaacggaatagtcgattacctgacttccgccatttctgaagatcctgcatattaataccataactactgaacaacataaaggtgtcatccagatattcgtcgatctgctcaatgagcttattgtcttcattatacttaattttgtaattaagtgcgaaggtcgcaatatgctcaatcagttcattcaactggaggttgatcgccgaggttgggtcgtttacccagccatgattgctttcttcaaggtttgcaaggcagtcatgatacagggtttcacagagaaacttaagctgtgcgatatcatgtcttttgggtgagtattcatccataacgcgtccccttcttagcggttgaactaacggacacctttcgggatggaaaaaacttactgacctggacttgccctctcgtttgttagcttaactataagccactctttgcaggttttcatcgcattattacgaaaaattacaattaggaaggaagcgggacaggactcactttttcatactagcactaacccgcagcaggtaaaagcagtttgctcgaactattcataacatttcaggattatcgccagatgaaattggtgacactaataccaggattgctctgaatatgacgtaataaccgaggaatgaataaagaattaccgcaaataattaagaatagcctctaaatgattatggattattaaatctattagcgctacttaatataaattaactaacaatcagtattttttatgaattttatccgtggttaatactggttttcgtatgagatcctgagttggtggttcaattactccttaatgttcgtaggttatgcataaaaaaggccgcttacgcggccttagtgattacacgttgtatcaatgatgatcgacagtatggctgtgctcgatatcttcattcttgcggctaaagcggcggcgaaccaccacaaagaataccggaacgaagaagattgccagtaccgttgcggtcaccatcccgcccattacaccggtacctactgcgttctgcgcgccggaaccagcaccagtactgataaccagcggcataacgccgaggataaacgccagcgaggtcatcaggatcggacgtaaacgcatccgcaccgcatcaagcgtcgcttcaatcagacctttaccttctttatccatcaagtctttggcgaattcgacgataaggatcgcgttcttcgccgacaacccaatggttgtgagcaggcctacctggaagtaaacgtcattggtcaggccacggaaggtggcagccagcaacgcaccgataacccccagcggaacgaccagcataacggagaacggaatcgaccagctctcgtacagcgccgccagacacaggaacacgacaatcaacgaaatcgcgtacagtgaaggtgcctggttgccggagagacgttcctgataggacatccccgtccagtcatagccaacaccggtaggcagtttgctcgccagttgttccatcagctccattgcttcaccggtacttttacccggtgccgcctggcctaagatttccatggatggcaggccgttgtaacgttccagacgcggcgaaccgtactcccaacgagaagaggagaacgccgagaatggcaccatctgaccatcagcagcacgaacataccagtcgccgatatcatccggcagcatacggtatttcgcttctgacatgacataaactttcttcacacgaccgcggtcgataaagtcgttcacatagctgccgccccatgcagcgcccagagtggtgttaatgtcgttgatagaaacacccagcgcctgcgctttttcctggtcgatatcaatcttaaactgcggggtatcttccagaccgtttggacgtacgctggtcaacatatcagggtgcttcgctgcttctgcaagcaactggttacgcgcctgagtcagtttttcgtgaccaaggccagcctggtcaatcagctcaaagtcaaagccggttgcagtacccagttccacgattgcgggcaggttaaaggcgaaaaccatcgcatctttgatttgcgagaaagcgcgtgttgcacgcatggtaatcgcttcaactttgttttcttcgcccggacgatcggcccagtccttcaaggaaacgaacgcaataccggtattctgaccacgtcccgcaaagccgaagccgttaacggcgaacaccgactcaacgttgttcttttctttggtcagatagtaatgcgttacctcattgagcactttctgtgtacgttcctgcgttgcacctgctggcagctgaaccatggtcataaacacgccctggtcctcatctggcaagaaggagcttggcagacgcacgaacagataggccatgccgaccacgatgatcagatacagcaccaggtaacgccccgtactgcgcagaataccgcctacgctgtcggtgtagtggtgcgtgctcttctcgaacatgcggttaaaccagccgaagaagccttttttaccttccccgtgatcgcctttggcaatcggtttcagcatggtggcacaaagagctggagtcaggatcaacgccaccagtaccgacagcgccattgctgaaacaatggtaatagagaactgacgatagatagcaccagtagaaccgccaaagaaggccatcggtacgaataccgccgacagtaccatcgcgataccgaccagagcgccctgaatctgccccatcgacttacgggtagcttcttttggcggcaaaccttcttccgccataacacgctcaacgttttctaccacaacgatggcgtcatccaccaacaggccgatggcgagcaccatcccgaacattgttagcgtgtttatcgagaagccaaaggcggcaaggacggcaaaggtcccgagcaataccaccggtacggcaatggtcggaatcaacgtcgcgcggaagttctgcaggaacagatacataaccaggaacacgaggatgatcgcttcgaccagcgttttaaccacttcgtgaatagagattttcacgaacggcgtggtgtcgtatgggtaaacaattttcagacccgacgggaagaacggttccatcttcgccagttcagcacggattgccgcagcggtatccagcgcgtttgcaccggtcgccagcttgatccccagaccggaagccggttggccgttaaactctgcgatgatgtcgtagttctcaccacccagctcaatcttcgcgacgtcacgcagcagcacgcgggaaccatcctgattcactttcagcaggattttgccgaactcttcagtagaggtcagacgcgtctgagcaataatagaggcgttaagctgttggcctttcaccggcggcgtaccaccgagctgacccgccgcaacctgggcgttctgcgctttgatggcggtaatgacatcaaccggcgttagctggaatttgttcagctcattcgggttcatccagatacgcatcgcgtactgtgaaccgaacaactgaacatcacccacgcccgacgtacggctgatggcatctttcatattcgccgccacgtagtcggagatatcctcctgcgtcatggtgccatcggtgttgataacgccgacaaccatcaggaagctgctggatgatttctcaacgctcaccccttgctgctgaacttcttgcggcagcaacggcatcgccagctgcagtttgttctgcacctgaacctgcgcgatatccgcatcagtaccagactcaaaggtcagggtgatctgcacggtacccgtggagtcactgttagaggacatgtacatcaggttatcgataccgttcatattctgttcgataacctgtgtcaccgtgtcctgcactgttttcgcatcagcgccggggtaggaggcggagatcgttactgccggcggtgcaatcgtaggatattgcgccaccggcagtttgaggatcgccagcccccctgccaacatgatgataatggcgatcacccacgcaaaaatcgggcgatcgataaagaaattaggcatgtcttaacggctcctgtttaagttaagacttggactgttcaggctgagcaccgcttgcggcttgctggttattatcagcggtaacttcttgtgcttttacctggacaccaggacgcactttctgcagcccacttattactacgcgatcgcctgctttcagaccttctgtcaccagccacttatcgccaatagcctggcttgcaacgatcggacgggtttccactttgtcatccgcgccaactaccagtacggtggcatcgccacgcggcgtacgggttacgccctgttgcgggactaaaatagcgtttggattaagcccttcttccagacgtgcgcgcacgaacatacccggcagcagagtgtgatccgggttcgggaagatagcgcgtagggtgatagacccagtggtctgatcaacggtaacgtcagagaattccagcgtaccgtcctgcgggaacttaatgccgtcactggtgatcagtgacactttggctttgccgttctcttgtttcagcgtgccattcgccagttcctgtttcaggcgcaggaagtcgttgctggactgggtcacatcaacgtagatcggatcaagttgctgcacggttgccagcgcagtcgcctgaccgttctgtaccaatgcgccttccgtcacgttcgacttaccaatgcgaccgctaatcggagaggtgactttggtgtaagccagattgatccgcgcagtttcaacggcagctttcgccgcagttaccgcagcattcgcctgttgcgcatcagccagagcctgatcgtactcttgcttactgatgtactgagtaccgagcagtttctgataacgattcaccgtcaattgcgcgatattggctgcagcctgggctttcgccagatcacctttcgcactgtcgtatgtcgcctgataggtcgcaggatcaatctgatagagagagacacctgcttcgatgtcgctaccttctttgaaattacgcttcaggataatcccgctaacttgaggacgaacttctgcgatccggtaggcactggtgcgacccggaagctcggttgtgatctgcagaggttcagttttgactgttactacgccaacggcgggcatctgctggccaccttgttgggcctgtttgtcgtcacatcctgttagggctaagctgcctgagagcatcagaacgaccgccagaggcgtaaaccctctgtttttgttcatatgtaaacctcgagtgtccgatttcaaattggtcaatggtcaaaagttaataaacccattgctgcgtttatattatcgtcgtgctatggtacatacattcacaaatgtatgtaaatctaacgcctgtaaattcacgaacatatggcacgaaaaaccaaacaagaagcgcaagaaacgcgccaacacatcctcgatgtggctctacgtcttttctcacagcagggggtatcatccacctcgctgggcgagattgcaaaagcagctggcgttacgcgcggtgcaatctactggcattttaaagacaagtcggatttgttcagtgagatctgggaactgtcagaatccaatattggtgaactagagcttgagtatcaggcaaaattccctggcgatccactctcagtattaagagagatattaattcatgttcttgaatccacggtgacagaagaacggcgtcgattattgatggagattatattccacaaatgcgaatttgtcggagaaatggctgttgtgcaacaggcacaacgtaatctctgtctggaaagttatgaccgtatagaacaaacgttaaaacattgtattgaagcgaaaatgttgcctgcggatttaatgacgcgtcgcgcagcaattattatgcgcggctatatttccggcctgatggaaaactggctctttgccccgcaatcttttgatcttaaaaaagaagcccgcgattacgttgccatcttactggagatgtatctcctgtgccccacgcttcgtaatcctgccactaacgaataaccctgaatctgactccaggatttttcctggacattttcgtcgttgctattctggttcactgcgtcgtgatattcttgcggtttgactttttcaggtcgttcttcaggttcagaaaccttcattcatcatgactatgttccagtattacaaacgatcacggcattttgttttttcagcatttattgcttttgtttttgtcttgttatgccagaacacggcgtttgcgcgggcgtcatcgaatggtgatctgccgacaaaagcggacctgcaggcgcaacttgactcactaaataaacaaaaagatctttctgctcaggacaaactggtgcagcaggatctgacagatacattagccaccctcgataaaatcgatcgcataaaagaagagacagttcagctacggcaaaaagtcgctgaagcgccggaaaaaatgcgccaggcgaccgcggcgttaacagcacttagcgatgtcgataacgacgaagaaacgcgcaaaattctgagcacgctgtcgttgcgccagctggaaactcgcgttgcccaggcgctggacgatttgcaaaacgcacaaaacgatctggcgtcttataacagccagctggtttcgttacagacgcagcccgaacgcgtgcaaaatgcgatgtataacgcttcgcagcagctgcaacaaattcgcagtcgtctggatgggactgatgtcggcgagacagccttacgtcccagccagaaagtgttaatgcaggcccagcaggcgttgctgaatgcggagattgaccagcagcgtaaaagcctggaagggaacaccgtcttgcaggataccttgcaaaagcaacgtgattacgtgacggcgaacagcgctcgtctggagcaccagttacaactgttgcaagaagcggtaaacagcaagcgcctgactttaaccgaaaaaacggcgcaggaagccgtctccccggatgaagccgcgcgtattcaggctaatccgctggtgaagcaggaactggaaattaaccagcagttaagtcagcgtctgattaccgcgactgaaaacggtaatcagttgatgcagcaaaacattaaagtcaaaaactggctggagcgggcgctgcaatcggaacgcaatattaaagagcagattgccgtcctgaagggcagcctgctgttgtctcgtatcctttaccagcaacaacaaacgctgccctcggcggatgaactggaaaacatgaccaaccgcatcgcggatttgcgtctcgaacagtttgaagttaaccagcagcgtgatgcactcttccagagcgatgcgttcgtcaacaaactggaagaaggtcacaccaacgaagtcaacagcgaagttcacgatgcgttattgcaagtggttgatatgcgtcgcgaattgctggatcaactcaacaaacagttgggtaaccagctgatgatggccattaacctgcaaatcaaccagcagcagttaatgagtgtgtcgaaaaacctgaaatccatcctgactcagcaaatcttttgggtgaacagtaaccgtccaatggactgggactggatcaaagcgttcccgcaaagcctgaaagatgaatttaagtcgatgaaaatcacggtgaactggcaaaaagcctggcccgccgtttttatcgctttcctcgctggtttgccgctgctgttgattgccgggctgatccactggcgtctgggctggctgaaagcgtatcaacaaaaactggcttccgctgtgggttccctgcgtaacgacagccagctcaacacaccaaaagcgatccttatcgacctgatccgtgcgctgccggtgtgcctgattattctcgcggttggcctgattctgttgaccatgcagctcaacatcagcgaactgctatggtcgttcagcaaaaaactggcgatattctggctggtgtttggcctgtgctggaaggtactggagaaaaacggcgttgccgtacgtcacttcggcatgccggaacagcagaccagccactggcgtcggcaaattgtccgcatcagtctcgcattgctgcctatccatttctggtctgtggtggcagaactttccccgctgcatctgatggatgatgtgctggggcaagcgatgattttcttcaacctgctgctgattgccttcctggtatggccgatgtgccgcgaaagctggcgtgataaagagtcgcacaccatgcgactggtcaccattaccgtgctgtcgataatcccgattgcgctgatggtgctgactgctacaggctacttctacactacgctgcgtctggcaggacgctggattgaaaccgtttatctggtgatcatctggaacctgctgtaccagacggtactgcgtggcttaagcgtagcggcgcggcgtatcgcctggcgtcgtgcgctggcgcgtcggcagaatctggtgaaagagggcgcagaaggtgctgaaccgccggaagaacccaccattgcactggagcaagttaaccagcagacgctgcgtattaccatgttgctgatgtttgcgctgttcggtgtcatgttctgggcaatttggtccgatttgatcaccgtgttcagctatctcgacagcatcacgctctggcattacaacggcactgaagctggcgctgcggtggtgaaaaacgtcaccatgggcagtctgttgtttgcgattatcgcctcaatggtggcctgggcgttgattcgcaacctgcctggtttactggaagtgctggtgctctcgcgactgaatatgcgccagggcgcgtcgtatgccattactaccatccttaactacatcattattgctgttggtgcgatgacggtgttcggatcgctgggcgtctcttgggataaactccagtggctggccgcagcattatccgtaggtcttggttttggtttacaagaaattttcggtaacttcgtctccggtttgatcattctattcgaacgtccggtgcgtattggcgatacggtaaccattggtagcttctcggggacggtaagtaagatccgtattcgtgcgacaacgattaccgatttcgatcgcaaagaagtgatcatcccgaacaaagcgtttgttaccgagcgtctgatcaactggtcgttgactgacactactacgcgtctggtgatccgtctcggcgtggcctatggctccgatctggaaaaagtgcgtaaagtgttactgaaggcggcgactgagcacccaagggtgatgcacgaaccaatgccggaagtcttctttacggcatttggtgccagcacgttggatcatgagctgcgtctgtatgtgcgtgaactgcgtgaccgtagtcgtactgtcgatgagctgaaccgtactatcgatcagctgtgccgtgaaaacgacatcaacattgcctttaaccagcttgaagtgcatctgcacaacgagaagggcgatgaggtgacggaagtaaaacgcgactacaaaggcgatgacccgacgccagcggtagggtaaaaacgaaagggggcaacatttagttgccccgagattgctaacaaagtgcgcgttgttcatgccggatgcggcgtgaccgccttatccggcctacgaaaccgcaagaattcaatatattgcaggagcggtgtaggcctgataagcgtagcgcatcaggcagttttgcgtttgcccgcaaccttaggggacatttagcgaccccatttatttctcacttttccgcctcatcatcgcgcgttaatttcttttcataatcacgctttacaatatccagcgcgcgcagcacggtactggcagggatctgattttcctccagcagcacaatcaaatcgacagccagtttgacatcgtcaggggcattttccagtgacatattctctccattgctagcgggttaaacgcgctaacctgttttcgattttttccagcgcatggcggcagcgtgccaggcgcgcttcataggcttccacttcacgatgcagcgtttgctgttccacgagatcggtcacccgcgccagacgggctctgcgttcggcaaccatctcacgtagccgccgctcaaaatcctgatgctgaatacgtttacgctgccagcgggcaattttcggtggtgcactgtcccactcgcgcaatgaccaggcggaggcttcacgcgcgatggcttccagttgtgccgccagatgttccgccagccaggccacttgcggcagctgttgctgctcaactgcatgacgaagcgcagccagattatcgcccgcctcgtcgagacaagcctgtagtgttgtcgcacgagtctgaaaaagatgcctgtcgaaacgagcacttagcgtggcgaactgtgacaccggggcacaacgctgacgcagcgtagcgagctgtccttccagtttttccagcagcagggcggttttcacgataagacctcaatgaaaatgataattgttatgctaaagtagccactctgtaagctgacaacactcaatatgcaacgaatcattttaatcatcattggctggctggcggtagtgctgggtacgctgggcgtggtattaccggtattaccgacgacgccgtttatcctgctggcggcctggtgctttgcccgttcttccccgcgctttcacgcctggttgctgtaccgctcatggtttggcagctatctacgtttctggcagaaacatcatgcgatgccgcgcggcgtcaaaccgcgggcgattttgcttattttgctcacgtttgccatttctctgtggttcgtccagatgccatgggtgcgcatcatgttgctggtaattctcgcctgtttgcttttctatatgtggcgaattccggtgattgatgaaaagcaagaaaagcactgaagcacaacaatcgcagttgcaattattgcgtacagccagtacattctggcgttttcgagcacaggcgcaggcggtcaaaggttaaacaactgttacttttgatacgtttaaaacgcgccgtgagtaccaccgtaacaagcaggcatacacttatgaccgcgactgcacagcagcttgagtatctcaaaaatagcatcaaaagcattcaggactacccaaaacccggcattcttttccgcgatgtcaccagcttactggaagacccgaaagcttacgctctcagcatcgacttgctggttgagcgttacaaaaatgcgggcattaccaaagttgtcggcaccgaagcgcgtggcttcttgtttggcgctccggtagctctgggtctgggcgttggctttgtaccggtccgtaaaccgggcaaactgccgcgtgaaaccatcagtgaaacttacgacctggaatacggcaccgatcagctggagatccacgttgatgccatcaaaccgggcgacaaagttctggtggtggacgacctgctggcaaccggcggcactatcgaagcgaccgttaaactgatccgtcgtctgggtggtgaagtggctgacgctgcgttcattatcaacctgttcgatctcggcggcgaacagcgtctcgaaaaacagggcattaccagctacagccttgtcccgttcccgggccattaattatcgccagtcttgtgctgcccacgctacggacagcacaagatgtgcattcagcctcgccgttctgacggggctgtgttagcattaccccttcgtgaatccaccttccagcgtttcagagcctgccaatgagttatcaggtcttagcccgaaaatggcgcccacaaacctttgctgacgtcgtcggccaggaacatgtgctgaccgcactggcgaacggcttgtcgttagggcgtattcatcatgcttatcttttttccggcacccgtggcgtcggaaaaacctctatcgcccgactgctggcgaaggggctaaactgcgaaaccggcattaccgcgacgccgtgcggcgtgtgcgataactgtcgtgaaatcgagcaggggcgctttgtcgatctgattgaaatcgacgccgcctcgcgcaccaaagttgaagatacccgcgacctgctggataacgtccagtacgctccggcgcgtggtcgtttcaaagtttatctgatcgacgaagtgcatatgctgtcgcgccacagctttaacgcactgttaaaaacccttgaagagccgccggagcacgttaagtttctgctggcgacgaccgatccacagaaattgccggtgacgattttgtcacgctgtctgcaatttcatctcaaggcgctggatgtcgagcaaattcgccatcagcttgagcacatcctcaacgaagaacatatcgctcacgagccgcgggcgctgcaattgctggcacgcgccgctgaaggcagcctgcgagatgccttaagtctgaccgaccaggcgattgccagcggtgacggccaggtttcaacccaggcggtcagtgcgatgctgggtacgcttgacgacgatcaggcgctgtcgctggttgaagcgatggtcgaggccaacggcgagcgcgtaatggcgctgattaatgaagccgctgcccgtggtatcgagtgggaagcgttgctggtggaaatgctcggcctgttgcatcgtattgcgatggtacaactttcgcctgctgcacttggcaacgacatggccgccatcgagctgcggatgcgtgaactggcgcgcaccataccgccgacggatattcagctttactatcagacgctgttgattggtcgcaaagaattaccgtatgcgccggaccgtcgcatgggcgttgagatgacgctgctgcgcgcgctggcattccatccgcgtatgccgctgcctgagccagaagtgccacgacagtcctttgcacccgtcgcgccaacggcagtaatgacgccaacccaggtgccgccgcaaccgcaatcagcgccgcagcaggcaccgactgtaccgctcccggaaaccaccagccaggtgctggcggcgcgccagcagttgcagcgcgtgcagggagcaaccaaagcaaaaaagagtgaaccggcagccgctacccgcgcgcggccggtgaataacgctgcgctggaaagactggcttcggtcaccgatcgcgttcaggcgcgtccggtgccatcggcgctggaaaaagcgccagccaaaaaagaagcgtatcgctggaaggcgaccactccggtgatgcagcaaaaagaagtggtcgccacgccgaaggcgctgaaaaaagcgctggaacatgaaaaaacgccggaactggcggcgaagctagcggcagaagccattgagcgcgacccgtgggcggcacaggtgagccaactttcgctaccaaaactggtcgaacaggtggcgttaaatgcctggaaagaggagagcgacaacgcagtatgtctgcatttgcgctcctctcagcggcatttgaacaaccgcggtgcacagcaaaaactggctgaagcgttgagcatgttaaaaggttcaacggttgaactgactatcgttgaagatgataatcccgcggtgcgtacgccgctggagtggcgtcaggcgatatacgaagaaaaacttgcgcaggcgcgcgagtccattattgcggataataatattcagaccctgcgtcggttcttcgatgcggagctggatgaagaaagtatccgccccatttgatcgtaagcacagcttacgttcgtcatccttaacgtgattgagagagaaacctatgtttggtaaaggcggtctgggtaacctgatgaagcaagcccagcagatgcaagaaaaaatgcagaaaatgcaggaagagatcgcgcagctggaagtcaccggcgaatctggcgcaggtctggtaaaagtgaccatcaacggtgcacacaactgccgtcgcgtagagatcgacccgagcctgctggaagacgacaaagagatgctggaagacctggtggctgcagcattcaacgacgcagcacgtcgtattgaagaaacgcagaaagaaaaaatggcctctgtatcctccggaatgcagctgccgcctggctttaagatgccgttctgatgcaaaccagcccgctgttaacacagcttatggaagcactgcgctgtctgccgggcgttggcccgaagtcggcgcagcgtatggcgttcacgctgcttcagcgcgatcgtagcggcgggatgcgtctggcgcaggcgctcacccgggcgatgtcggaaatcggccactgcgccgattgccgcactttcaccgaacaggaagtctgtaacatctgttcgaatccgcgtcgtcaggaaaacggtcaaatctgcgtggtggagagtccggcggacatctacgccattgagcagacggggcagttttcaggtcgttattttgtgttgatggggcatctgtcaccgctggacggcatcggtccggatgatatcgggcttgatcgtctggaacagcgtctggcagaggaaaaaatcactgaagtgatcctcgccaccaaccccacggttgaaggtgaagctaccgctaactacattgccgagctttgcgcgcaatatgacgtggaagccagccgaatcgctcatggcgttccggttggcggcgagctggaaatggtcgacggcaccacgttgtcacactcccttgccgggcgtcataagattcgtttttaagcaaacgagagcaggatcacctgctctcgcttgaaattattctcccttgtccccatctctcccacatcctgtttttaaccttaaaatggcattattgaggtagacctacatgaaaggacaagaaactcgtggttttcagtcagaagtgaaacagcttctgcacctgatgatccattctctctattccaataaagaaatcttcctgcgtgagcttatctctaacgcctccgatgcggcggacaagctgcgtttccgtgcgctctctaacccggacctgtacgaaggtgatggcgaactacgcgttcgtgtctctttcgataaagacaagcgtacgctgaccatctccgataacggcgtggggatgacccgcgacgaagtgattgaccatctggggactatcgctaaatccggtaccaaatcattcctcgaatccctgggttctgaccaggcgaaagacagccagctgatcggtcagtttggtgttggtttctactctgcgtttatcgtggccgacaaagtgaccgtgcgtactcgcgcggcaggcgaaaaaccagaaaatggcgtcttctgggaatcggctggcgaaggtgaatacaccgttgccgacatcaccaaagaagatcgtggtactgaaatcaccctgcatctgcgtgaaggcgaagacgagttcctcgatgactggcgcgtgcgttccatcatcagcaaatactccgaccatatcgcgctgccggtagagatcgaaaaacgcgaagagaaagacggcgaaaccgttatctcctgggagaaaatcaacaaagcgcaggcgctgtggactcgtaacaagtcggaaatcaccgatgaagagtacaaagagttctacaaacacatcgcccacgactttaatgatccgctgacctggagccacaaccgtgttgaaggtaagcaggagtacaccagcctgctgtacatcccgtcccaggctccgtgggatatgtggaaccgcgatcataaacacggcctgaaactgtatgttcagcgtgtgttcatcatggacgacgcagaacagttcatgccgaactatctgcgcttcgtgcgtggtctgattgactccagcgatctgccgctgaacgtttcccgtgaaatcctccaggacagcacggtaacgcgtaacctgcgcaatgcgctgaccaagcgtgtgctgcaaatgctggaaaaactggcgaaagacgacgcggaaaaataccagaccttctggcaacagtttggcctggtactgaaagaaggtccggcggaagatttcgctaaccaggaagcgatcgccaaactgctgcgttttgcttctacccataccgattcttctgcgcagaccgtatctctggaagactacgtttcccgcatgaaagaagggcaggagaaaatctactacatcaccgcagacagctatgcggcagcgaagagcagcccgcacctggaactgctgcgtaagaaaggcatcgaagttctgctgctttccgaccgcatcgatgagtggatgatgaactatctgactgagttcgacggtaaaccgttccagtcggtgtctaaagttgacgagtcgcttgaaaaactggctgacgaagttgatgagagcgcgaaagaagcggagaaagcactgactccgttcatcgaccgtgtgaaagccctgctcggcgagcgcgtgaaagatgtccgtctgactcaccgtctgaccgatacgccagcgatcgtttcgaccgacgcggacgaaatgagcactcagatggcgaaactgttcgctgcggcgggccagaaagtgccagaagtgaaatacatcttcgaactgaacccggatcacgtactggtgaaacgtgcggcagatactgaagatgaagcgaagttcagcgagtgggtagaactgctgctggatcaggcgctgctggcagaacgcggcacgctggaagatccgaacctgtttattcgtcgtatgaaccagctgctggtttcctgatgtaatgccggatgaccttcgtgtcatccggcatttttcttttcatcatctgcactttccgcaaattatctcgccattaaccgtttcagccccaggtgcctttcttgaggcaatcgcctgttggtggtatcgtttatcgctttttcaaaaaattcgacacattttaaggggattttcgcaatgcgtatcattctgcttggcgctccgggcgcggggaaagggactcaggctcagttcatcatggagaaatatggtattccgcaaatctccactggcgatatgctgcgtgctgcggtcaaatctggctccgagctgggtaaacaagcaaaagacattatggatgctggcaaactggtcaccgacgaactggtgatcgcgctggttaaagagcgcattgctcaggaagactgccgtaatggtttcctgttggacggcttcccgcgtaccattccgcaggcagacgcgatgaaagaagcgggcatcaatgttgattacgttctggaattcgacgtaccggacgaactgatcgttgaccgtatcgtcggtcgccgcgttcatgcgccgtctggtcgtgtttatcacgttaaattcaatccgccgaaagtagaaggcaaagacgacgttaccggtgaagaactgactacccgtaaagatgatcaggaagagaccgtacgtaaacgtctggttgaataccatcagatgacagcaccgctgatcggctactactccaaagaagcagaagcgggtaataccaaatacgcgaaagttgacggcaccaagccggttgctgaagttcgcgctgatctggaaaaaatcctcggctaattcgaaagcgcgcacggacagtcccctcgccccctcggggagagggttagggtgaggggaacaggcccgcacaagcaaacttatcagcaatctcaggccggatattcattcggccttttacaaaaacctcaatctgcgctattcctttttctgatttgacctctcacagcaattagttcttcttcctcacttttccgctacaattatcaacaagttgaatcgataagaggcggtaatgcgtcagactaaaaccggtatcctgctggcaaacctgggtacgcccgatgcccccacacctgaagcggtaaaacgctatctgaaacaatttttaagcgacagacgcgtggttgatacctcacggttgttatggtggccattgctgcgcggcgtgattttgccgctgcgctcgccgcgtgtggcgaagctgtatgcctctgtctggatggaaggtggctcgccgctgatggtttacagccgccagcaacagcaggcgctggcacaacgtttaccggagatgcccgtagcgctgggaatgagctacggctcgccatcactggaaagcgccgtagatgaactcctggcagagcatgtagatcatattgtggtgctgccgctttatccgcaattctcctgttctacggtcggtgcggtatgggatgaactggcacgcattctggcgcgcaaacgtagcattccggggatatcgtttatacgtgattacgccgataaccacgattacattaatgcactggcgaacagcgtacgcgcttcttttgccaaacatggcgaaccggatctgctactgctctcttatcatggcattccccagcgttatgcagatgaaggcgatgattacccgcaacgttgccgcacaacgactcgtgaactggcttccgcattggggatggcaccggaaaaagtgatgatgacctttcagtcgcgctttggtcgggaaccctggctgatgccttataccgacgaaacgctgaaaatgctcggagaaaaaggcgtaggtcatattcaggtgatgtgcccgggctttgctgcggattgtctggagacgctggaagagattgccgagcaaaaccgtgaggtcttcctcggtgccggcgggaaaaaatatgaatatattccggcgcttaatgccacgccggaacatatcgaaatgatggctaatcttgttgccgcgtatcgctaaagctgagcggtaaagaactgagcgccgtcgcgaagagcctcgtcggcggttttcatcatccgtgaataatgcaaaaaggcgtgcagcgtgcctgggtagagtttgaactcacagggctgctgatgcgccgctaacgtctggtaaagcagacggctgtcatccagcagcggatcgaactccgccccggcaataaaacagggcggaacttcgcgagtgagatcattattaaacagacagtaatacggcgactcgcggtccgcgtcgttgcttaaatatgcctcttcgtacatctgcaaatcctgttgcgttaagccatcccagacaccgcccaacagacgacgagtcacggaatcccgtaatccgtaaagcccataccacagcaaaacgcccgcaactttaccgcaatcgatctgtttatcacgcaaccacaacgcactggcgagcgccagcatggcacctgcggaatcaccggcaaagccaatgcgggacatattgatttgataatcctccgcctgctggtggaaataacaacaagcagccacaatttcctctatcgcttgcggaaaacgcgcttcaggtgaaagggtgtaatcaataccaatcaccgtacattggctgtagcttgccagcaggcgcatgatgcgatcgtgggtatcgagattgccgagaataaaaccgcctccatgcaaataaaatagcgtcgctgggctatctggctgcggacaaaagagacgtgtttccacctgcccatattttgttggaaccatgtaagctctggttgccatttctggagcgcccgcattccagaatcggcgctcaagcgtgtaatactgtcgttgctcagcaatcgttcccgttgcgggccagggcggtaaatccggctgaagagtattcacaacggtcttcatttcagcagaaataaggtccagaacaggtagtttgttttccggcttcatacaaaaactcctttcaaattacgtcattgtaaggaaccactgccatgaaaatgcgatcccgcctgctgatattgaaactggctgcgtctcgcgcgctcccgtcagattgtgttaacattcgccgctcagttaaccacccgtaaaaacaaccatgaaatttcccggtaaacgtaaatccaaacattacttccccgtaaacgcacgcgatccgctgcttcagcaattccagccagaaaacgaaaccagcgctgcctgggtagtgggtatcgatcaaacgctggtcgatattgaagcgaaagtggatgatgaatttattgagcgttatggattaagcgccgggcattcactggtgattgaggatgatgtagccgaagcgctttatcaggaactaaaacagaaaaacctgattacccatcagtttgcgggtggcaccattggtaacaccatgcacaactactcggtgctcgcggacgaccgttcggtgctgctgggcgtcatgtgcagcaatattgaaattggcagttatgcctatcgttacctgtgtaacacttccagccgtaccgatcttaactatctacaaggcgtggatggcccgattggtcgttgctttacgctgattggcgagtccggggaacgtacctttgctatcagtccaggccacatgaaccagctgcgggctgaaagcattccggaagatgtgattgccggagcctcggcactggttctcacctcatatctggtgcgttgcaagccgggtgaacccatgccggaagcaaccatgaaagccattgagtacgcgaagaaatataacgtaccggtggtgctgacgctgggcaccaagtttgtcattgccgagaatccgcagtggtggcagcaattcctcaaagatcacgtctctatccttgcgatgaacgaagatgaagccgaagcgttgaccggagaaagcgatccgttgttggcatctgacaaggcgctggactgggtagatctggtgctgtgcaccgccgggccaatcggcttgtatatggcgggctttaccgaagacgaagcgaaacgtaaaacccagcatccgctgctgccgggcgctatagcggaattcaaccagtatgagtttagccgcgccatgcgccacaaggattgccagaatccgctgcgtgtatattcgcacattgcgccgtacatgggcgggccggaaaaaatcatgaacactaatggagcgggggatggcgcattggcagcgttgctgcatgacattaccgccaacagctaccatcgtagcaacgtaccaaactccagcaaacataaattcacctggttaacttattcatcgttagcgcaggtgtgtaaatatgctaaccgtgtgagctatcaggtactgaaccagcattcacctcgtttaacgcgcggcttgccggagcgtgaagacagcctggaagagtcttactgggatcgttaagttatcgtcggttcgtaggccagataaggcgttcacgccgcatctggcatttggctctcgatgcctgatgcgacgctggcgcgtcttatcatgcctacatatttttcatattttacatccggcaaccaccgtttaccccgtcaccacctcacccgccggtggcgtttccagcagttccagcatggtacgggcgatttcacgctcgcccatcactacctgattcgcaccacgttcggtgatatacgccacttcatcgtcataatgggcgcgggcaataatctcaatatccggatttttcgcgcgggcagatgccacaatctcacccgcttcataaccgttgggaatcgtcaggatcagccattttgcacattccagatgcgccagttgcataatttcttcgttcgccgcattgcccaatactgcgcggaccccgcgctctcgcagctcatcaacacgggttcgtgacgtctcaatcaccaccagcggaatatcagaggcgagcaatttctcccccagcaggctgcctacacgaccgtaacccaccagtagcgcatggttgcaaatatccactgggatctgcttctcttcttcgattgcctcttccagcgtctgctcttccagcgtttcggtcttcgccagatatttctccagtagtgcgaacagtaccgggttgagcataatcgacaggatcgcccctgccagtaccaggttttgtccggcctgcggcagtaaattcaatgccattcccagtcccgccaggataaacgcgaactcaccaatctgcgccaggctggcggcgatggttaatgccgtacgttgggagtgaccaaacagtcgcaccaggaaaaatgcggctaacgacttaccaaacagaataatcgccagcgtcgccagcactgccagcggttgctgaatcagaattaacggatcaaacaacatcccgacggagacaaaaaacagcaccgcaaacgcgtcgcgcaatggcagcgtatcgtgggcggcacggtgactcagttcagactcgttcagtaccatcccggcaaagaacgcaccgagtgcaaaggagacatcaaacagctctaccgcaccaaaggcaacccctaacgccagcgccagcaccgacagggtaaacagctcgcgagaaccggttgccgcgctgcgtgccataatccacggcaccagacggcgacctaccagcatcataatggcgataaatgcgatcactttgccgatggtgatccccatatcgactgcaagagtggcaaagcccacatcgccctgttccatcattcctgccactgcgggcagcaacaccagcgtcagaaccattaccaggtcttccacaatcaaccaaccgatggcgatttgcccacgctgactgtcaattaattgccgttcttcaagtgcgcgcagtaacaccacggtactggcggtggaaagacataaaccgaacacgataccggtcattaacgaccagcccagcacggcagagagcgccatacccagcagcgtcgccacggctatctgggcgatcgcaccgggaatggcgatggcctttaccgccatcaaatccttcagcgaaaagtgcaaaccgacgccaaacatcaacagaatgacgcccagttcagccagttccggggcaagcttggtatcggcaacaaagcccggagtgaatggtcctgccagcacacccgctaacagatatcccaccagaggagaaatacgtagtttattggccagcatgccgaggataaaggcgagcacaaggccgccaacaatggtggtgataagcggggtggcgtgatgcattccgtctccttttcctggtggttattgtccatttttggccgggaaaaccaaaattacaggtaatagtttatgacaatttcattgatgatgttcatgaataattattgaattttgcagaaaaatggaattagctgcaaaaaaagcacggatcggaaaacagaaggcggtttaacagaggaaaggcttatggcgactgtaaaacgatgcagccaaagtttgcctttggctgcaatgaaatcagtctttatgccggttatcaggcaggaatatggtcaacatccccaatagtggcaggaaagcacagattttatagactaactcgatgctggtgtgatcggcgataagccccagaactgccgctcccagacctcccatgccaaaagcaaaaccgaaaaagagtccagaaaccataccgatacgtcctggaagcagctcctgagcgtagaccagaatggcagagaatgccgaagcgaggataaatccaataatcaccgttaaaacccccgtccagtgcaggctggcgtagggtaaaatcagcgtaaacggcgcaacgccgaggatagagccccaaatcacatatttccgcccaattttatcccctacaggcccgccgatcaccgtacctgccgcaacggcaaacaggaaggcaaacagatgaagctgagcattctggatagataatccgaatttttgcatcagataaaaggtgtaatagctgctgatgctcgccatatagaaatatttcgagaaaatgaggattaacagaatgctgaccgccagtacaactttattgcgcggcagtggattgataatcgtcgctttgggttttcctttattcattcggtgctgtgccgagtaccaacggctgatttgcgccaacaccacgatcgccagcagtgccgcaagcacaaaccaggcaacgttgcctttgccataaggcgcgataatcaccgccgccagcaagggtcccagggaactgccaaagttgccgccgacctgaaagatagattgcgccaggccatgccgcccgccggaagccatacgggccacgcgagaagattccggatgaaagaccgatgaaccggtaccgaccagcgccgccgccagcagaactgcgccaaaactgcccgccagcgcaagcagcaccagaccgcttaaggtaaagcacatgccaattggcaacgaccatggcatcggatatttatcggtccagtagccgaccactggttgcagtagcgaagaggcgagctggaaggtgagggttatcatgccaatctgcataaatgtcagagaaaattctgactgaagcagcggataaatcgccagaatcagcgattggatcatgtcgttcagcagatgtgagaggctgatagcacctaaaataccaaacgatgttcgggccttggtcgttgacgcagccgcgcccgccacaggctggggttgttcactcattgccataggaaagtcactttttcagggttgcgatgtaaagaatgatcttatttgtgattattaccagactaacatacctgtatgcgtcgtctgaaggaagtctcaacgccgaatacagaatttctaatctggatgcagatttatcttcaccggacgcagacttgtctatgatgtcgcgtcatactatttttcaacacgttgaaatcaggtcagggagagaagtatgaaattattgcagcggggcgtggcgttagcgctgttaaccacatttacactggcgagtgaaactgctctggcgtatgagcaggataaaacctacaaaattacagttctgcataccaatgatcatcatgggcatttttggcgcaatgaatatggcgaatatggtctggcggcgcaaaaaacgctggtggatggtatccgcaaagaggttgcggctgaaggcggtagcgtgctgctactttccggtggcgacattaacactggcgtgcccgagtctgacttacaggatgccgaacctgattttcgcggtatgaatctggtgggctatgacgcgatggcgatcggtaatcatgaatttgataatccgctcaccgtattacgccagcaggaaaagtgggccaagttcccgttgctttccgcgaatatctaccagaaaagtactggcgagcgcctgtttaaaccgtgggcgctgtttaagcgtcaggatctgaaaattgccgttattgggctgacaaccgatgacacagcaaaaattggtaacccggaatacttcactgatatcgaatttcgtaagcccgccgatgaagcgaagctggtgattcaggagctgcaacagacagaaaagccagacattattatcgcggcgacccatatggggcattacgataatggtgagcacggctctaacgcaccgggcgatgtggagatggcacgcgcgctgcctgccggatcgctggcgatgatcgtcggtggtcactcgcaagatccggtctgcatggcggcagaaaacaaaaaacaggtcgattacgtgccgggtacgccatgcaaaccagatcaacaaaacggcatctggattgtgcaggcgcatgagtggggcaaatacgtgggacgggctgattttgagtttcgtaatggcgaaatgaaaatggttaactaccagctgattccggtgaacctgaagaagaaagtgacctgggaagacgggaaaagcgagcgcgtgctttacactcctgaaatcgctgaaaaccagcaaatgatctcgctgttatcaccgttccagaacaaaggcaaagcgcagctggaagtgaaaataggcgaaaccaatggtcgtctggaaggcgatcgtgacaaagtgcgttttgtacagaccaatatggggcggttgattctggcagcccaaatggatcgcactggtgccgactttgcggtgatgagcggaggcggaattcgtgattctatcgaagcaggcgatatcagctataaaaacgtgctgaaagtgcagccattcggcaatgtggtggtgtatgccgacatgaccggtaaagaggtgattgattacctgaccgccgtcgcgcagatgaagccagattcaggtgcctacccgcaatttgccaacgttagctttgtggcgaaagacggcaaactgaacgaccttaaaatcaaaggcgaaccggtcgatccggcgaaaacttaccgtatggcgacattaaacttcaatgccaccggcggtgatggatatccgcgccttgataacaaaccgggctatgtgaataccggctttattgatgccgaagtgctgaaagcgtatatccagaaaagctcgccgctggatgtgagtgtttatgaaccgaaaggtgaggtgagctggcagtaatccgaaagtgccggatgtttgcatccggcacaatgcttaatcgcggcgggcgatatcagcaaatttggcatcgaggatctttgccagatcgcctgccgccagttcgatatccagtccgcgcttgccgccggaaacataaatagtggcaaattcttgtgcgggggcgtcgataatcgttggcagacgttttttctgccccagtgggctaatccccccaaccaggtatcccgtcgaacgctgcgcgaccatcggatcggccatctcaactttcttggcacccagcgcttttgctacttttttaagatccagttgacctgcgaccggcgtaacggccacggcaaggtgtttcatatcaccgttcactgccaccagcagcgttttgtagacctgatccggattcaaacctaattttttgacgacttcatcgccaaaattggtttcagccggatcgtgctcgtaggtatggatttgaaacgaaatcttgtttttttcgagtaatttaactgcgggtgtcatggtaattttcctgccttaaacaaaaaaacgaagcaagcatacgcctgatggcggtccaaaaaaaagagtcatcttgcctaagagtattggcaggatggtgagattgagcgacaatcgagttacaccgtcgcttaaagtgacggcataataataaaaaaatgaaattcctctttgacgggccaatagcgatattggccatttttttagcgcaacatttgcggcaaattcccttctccatacaggtgtagtgcaccgaccgcgaccacatatcgccccggcggcatggcgcgtaatttatcccgccaggcgagatttcgctgatgcatcagcacatcgtacagcgactgactgaacgtattgggcagcgttatatcattattttgcggcggtgcattcagccaccagctcatcatttgttgcagcaaccgtgcgttggtatgccagtgggtcagcgtatcgtccagcagcgccagtcctttgtcagggagctggagcaacatggcaatctggttttcagccccttccagttcaatcacgggtttatgttgttgcttcgccgcctgcaatagctggtaatcgataccgtattctgcccgcagccccagtttttgtgcctgcgtcgcctgaagaaccatcgcgatttgccacagcggttgggtagaaaagagtgagggagaaatgcccatctcctggctaatgtgctgcaggttttggagttgctcctcgctaatgcgctcttccagcgcctcgcaggcaggcaaattagcaaaaggcgtatcgctggtggaaacatccgcctcgacgatcagcgcatcggcgtttttgagctttttgagcaaacgggtgggcaggggagccatatcgtggctacccatatgaatactgccaatcagatgaaaatggcgattgccggggagggtgatatcgatggcaggccaggtgtaatgattaccgcgcagcgcggcccaaagcgtttttacccggtacaacagatccatacgacctccctttgtgaaatatcatgctagcgcgcggtgagggatggcgcaaatggagttggagacttgtttaatgtgtttgtatgattcagtatgttcttgcatcgctattcacaaggaagcaacagttaaaaaccatgaaacaggcaacaagaaaaccgacgacacccggagatattcttctctatgaatatctggaaccgctcgatttgaaaatcaatgagttagcagagttgctgcatgttcatcgtaatagcgtcagtgcactgatcaataacaatcgtaaactcactactgagatggcatttcgtctggcgaaagtttttgataccacagtcgatttttggctaaacctccaggcggcggttgatctttgggaagttgaaaacaacatgcgcacccaggaagaattgggacggattgaaacagtggctgaatatttggcacgccgtgaagagcgtgcaaaaaaggtcgcgtaaggccaaaacatcgcttcatctcgtaggccggataaggcgttcacgccgcatccggcatccgagcaccattgcctgatgcgacgcttacccgtcttatcaggcctacaaacttgtgcctgaaccgtaggccggataaggcgtttacgccgcatccggcatccgagcaccattgcctgatgcgacgcttacgcgtcttatcaggcctacaaacctgtgcctgaaccgtaggccggataaggcgtttacgccgcatccggcagtcatgcgtcgatgccaaatgcgccaccctaaagcagcgcatccgcaatgatgtacttattccttcggtttaaaccgcagcaaccggttggcgttactcactacggtaatcgacgagagcgccattgccgctccggcaactaccgggttaagcagtgttccagtgaacggccacaaaataccggcggcgaccggaataccgatactgttgtagataaacgcaccgagcaggttctgcttcatgttgtgcagcgttgcgcgggaaatagcgagcgcatccgcaacgcccatcaggctatggcgcatcagggtaatcgccgcggtttcaatggcaacatcactgccgccacccatcgcaatgccgacatccgcctgagccagcgctggcgcgtcgttaatgccgtcgcccaccattgccacctgacgtccttcactttgcagatgtttgatcgcttcggctttaccgtccggcagcaccccggcgatcacctcatcaatccctgcttctttggcgatcgcattggcggtggttgggttatccccggtcaacatcaccagacgatatcccgctttatgcaggcgttgcagcgccgccacgctatcactacgcaacggatcgcgtactgccagcagggctaccgctttcccgtcaaccgccagcagcacaggcgttgccccttgcgatgcctgagcagtaatctccgcttcgatagctttggtaccaacctgttgctcatttaacagcgcctgattgcccagcaataacgcatgaccttcagcttcaccgctcacgcccagcccgcgcaatgtgcggaaaccgttgacctgcggtagctgcatatcacctgctttatcgaggatcgctcgtgccagcggatggctggaaccttgctccagtgccgccgccagacgcaatgcctgcgcttcatcaacatcagcaaatgttttcactgcgacaacctgcggcttcccttcagtcagcgtcccggttttatcgaacactacagtgtcgagtgtactggcgcgttgcagcgcgtcagcgtcccgcaccagcacgccaaactcagccgcccgcccgacgccggaaataatcgacatcggcgtcgccagccccagcgcacacggacaggcaataatcagtaccgtggtggcaatcaccagggtatagacaatctgcggtgccggaccaaagaaataccagattgccgcactgacaagcgcaataaccaccactaccggcacaaatacggctgagattttatccgccagctgaccgatttctggcttgctgctctgggcctggcgcaccatgcgaatgattcgtgacagcgtagtatggctgccaaccgcactggcacgaaacagcacactgccgtcctgtaccactgtcccggcatggacgctatcgccttcgcctttttgctgcgggattggttcgcccgtcagcatcgcttcatccagccatgcttcgccctgggtaatctcgccatctaccggcacgcgatcgccggtcgtcaggcgcagcaacatacctggctgcacttctgccagaggcacgcttttttcaccttcgtcagtaaccaggcgtgccgtcggcggggttaaatcgagtaacttttccagcgccttagaagaacgctggcgtgcgcgcgcttccagcatatggccgagattgatcagaccgataatcatcgcgctggcttcgtaataaagatgtcgcgcttccatcgggaaccactgcggccacaggttgacgctcatcgaatagagccacgccacgccagtacccagcgccaccagcgtatccatcgtcgccgcaccgttcagcaggcttttccatgcactgcggtaaaaatggccgccggcgaaaaccatcactgccagggttatcaggccgataaccaaccacaggctgcggttgtcagcggtgaccatcatgttatcgccgatcatcccccagaccatcaccgggatacccaccgccagtgcgacaattgcctgccagcggaagcgcttcatcgtagcgacggcggtttcttgctggcgctcgcggcgtttagcgtcatcttcaatcgcttccgcgccgtagcccgctttttccaccgcctgcactaaatcttgtggggaggcactgcccatcaccagcgcagtacgctccgccaggtttacccgtgcctgagtgacgcccggtacgctttgcagcgcattttgtacgcgggtgacacagctggcgcagctcatgccgctcagcagcaactgctggctgtcatcgtcatcggcggtcgctgccggaagcgcctcagaaaccgctgtcagtgcttccgacgggattgatgactccgccagcggtttagcctttgggtggcttacagatgcgtcataacccgcttgtttgatggtttcgatcagctgttctgcactggcagtcccggtaacgtgcgcttcagtgatagacacatccgcctgctcaacatccggacgctgttcaagactttctttcacgcgtttaacgcagtgaccgcaggacaggccgtccagggtcaggtcgatagtttgtgacataaaacactcctttaagacagttttgactggctgtgataaaggttaaaccttccagcaaggggaaggtcaagaaattaataaaccaggcgggtaaaagtccgtaaagattaaaaaatcggctcgatttgcatcaggattagacatttatctctttgttttcctgtagttaagttgcgggtgctaagttaaatcaggatgcctgaaaatcggcaccggggtgaggaattacctcccgcatctataaaaaggagttaacaaaagatgttagatgcaaacaaattacagcaggcagtggatcaggcttacacccaatttcactcacttaacggcggacaaaatgccgattacattccctttctggcgaatgtaccaggtcaactggcggcagtggctatcgtgacctgcgatggcaacgtctatagtgcgggtgacagtgattaccgctttgcactggaatccatctcgaaagtctgtacgttagcccttgcgttagaagatgtcggcccgcaggcggtacaggacaaaattggcgctgacccgaccggattgccctttaactcagttatcgccttagagttgcatggcggcaaaccgctttcgccactggtaaatgctggcgctattgccaccaccagcctgattaacgctgaaaatgttgaacaacgctggcagcgaattttacatatccaacagcaactggctggcgagcaggtagcgctctctgacgaagtcaaccagtcggaacaaacaaccaacttccataaccgggccatagcctggctgctgtactccgccggatatctctattgtgatgcaatggaagcctgtgacgtgtatacccgtcagtgctccacgctcctcaatactattgaactggcaacgcttggcgcgacgctggcggcaggtggtgtgaatccgttgacgcataaacgcgttcttcaggccgacaacgtgccgtacattctggccgaaatgatgatggaagggctgtatggtcgctccggtgactgggcgtatcgtgttggtttaccgggcaaaagcggtgtaggtggcggtattctggcggtcgtccctggagtgatgggaattgccgcgttctcaccaccgctggacgaagatggcaacagtgttcgcggtcaaaaaatggtggcatcggtcgctaagcaactcggctataacgtgtttaagggctgatcatgatgaacacggaaggtaataacggtaacaaacctctcggtctatggaacgtcgtttccatcggcattggggcaatggtgggggcggggatcttcgcgctgctggggcaggctgcattgctaatggaagcctcgacctgggtcgcctttgcttttggcggtattgtggcgatgttttccggttatgcctatgcgcgtctgggggcgagctatcccagcaatggcggcattatcgacttctttcgtcgcggattaggcaacggcgtcttttcgctggcgctctcgttactgtacctgttgacgctggcggtgagcatcgccatggtcgcccgtgcttttggcgcttatgccgtgcagtttttgcatgaaggcagccaggaggagcaccttattttgctctacgcgttggggatcattgcggtgatgacgcttttcaactccttaagcaaccatgcggtagggcggctggaagtgatcctcgtcggcattaaaatgatgatcctgttattgctgattattgccggtgtctggtcgctgcaaccggcgcatatttccgtctctgcgccccccagctccggtgcgttcttctcctgtattgggataactttccttgcctatgcgggctttggcatgatggcgaacgcggcggataaagtgaaagatccgcaggtcattatgccacgggcgtttctggtggcgattggcgttaccacgttgctttatatctcgctggcactggttttgcttagcgatgtatcggcattagagttagaaaaatatgccgataccgccgtagcgcaggctgcttctccgctgctcgggcatgtgggttatgtgatcgtcgtcatcggcgctttactggcgacggcttcagccattaacgcgaacctgttcgccgtgtttaacatcatggacaacatgggcagcgaacgcgaactgccgaagctaatgaataaatccctgtggcggcagagtacctggggcaacattattgtcgtggtgttgattatgctgatgacggcggcactgaatttaggctcactcgccagcgttgccagcgccacctttttgatttgctacctggcggtgtttgtggtggcgatccgcctgcgtcatgatattcacgcctcgttgccgattcttatcgttggtacgttggtgatgttgttggtgatcgttggctttatctacagtctgtggtcccagggtagccgtgcgttgatatggattattggctcactcttactcagccttattgtggcaatggtcatgaagcgcaataaaaccgtataacatctctctgtgcgcagtacttcctgtattattgtggtggcggtcgatattcgcactggcaaaaaaacgtgcttgaatatctgttgaaaccctttaacaaagcacaggaggcgttgcgcgaacgatgaacatcagcgatgtagcaaaaattaccggcctgaccagcaaagccattcgcttctatgaagagaaggggctggtgacgccgccgatgcgcagcgaaaacggttatcgcacctacacgcagcagcatctcaacgaactgaccttactgcgccaggcacggcaggtgggctttaacctggaagagagcggcgagctggtgaatctgtttaacgacccgcagcggcacagcgccgacgtcaaacggcgcacgctggagaaggtggcggagatcgaacgacacattgaggagctgcaatccatgcgcgaccagctgctggcactggcgaatgcctgccctggcgatgacagcgccgactgcccgattatcgaaaatctctccggctgctgtcatcatcgggcagggtgattaagacgagacggctcggatatgtagggttatcccttctatcgcaatgacttcaacatgcgtacctgcaccgagatcctcgctggcgctgacaggccatgaactgtcaccgacgcgcatatgaccgcgcccgttgaccagcggagattccagcacaaaacgtcggccaatcagctgctgcccgcgctggtttaaatgactatcgctgtgcttttgttcgcgcacccgccgcgacaaccatttccaccacagccaggcggcgagcagcgtcaggatggcaaacattaccccttgccactcccaacccagcggcaccagccagaccaccaggccggtaatcaccgctgccacgccgctccacaacaaataaccatttccgcccagcatctcggctgccagcagcaaaccgccgagactgagccagaaaatatgtggatgaacgaccattaactccatcatggctgagtccgtttgttggcgctgtctttcaccagctcggcaatcccggcaatcgaccccatcaggctgctggcctctaatggcatcatcactactttgctgttactggaggaaccgatctgctgtaacgcttcggtgtatttctgcgctacgaagtagttcaccgcctgaatatcaccggaggcgatagcttcagacaccattttggtggcgcgggcttctgcttcggcggaacgttcacgcgcttcagcctgtaaaaacgccgactgacgttcgccttccgctttcaggatttgcgactgtttttcaccttcggctttgaggatttccgcctgacggatcccttccgcttcaagaatgtaagcgcgtttggtacgttccgctttcatctgcgcgttcattgaagagataagctctgccggtgggcgcacgtcgcgaatttcaatacgggtgactttaatcccccacgggttggtggcttcatcgacaatacgcagcaggcgtgagttgatgctgtcgcgctgagagagcatttcgtcaagttccattgaacccagcacggtacggatgttagtcatggtcaggttgatgatcgccagctccagattgctgacttcataagccgcgcgcggcgcgtcaatcacctgaataaagcacacggcgtcgatggtaacgttggcgttatctttcgagataacttcctgggaagggatatcgagcacttgctccatcatattgatcttgcgaccaatgcgatccataaacggcaccaccagactgagccccggctgtaacgttttggtatagcgaccaaagcgttctactgtccactgatagccctgcggtacgattttgacacccgcgccgacaatgaccagcgcgacaaaaatgagaatcgggataaagataagcatcggaaaaacctcctgttgtaccgtccataatcagcaaaattgctgcttgattaaacaaattatacctgattactgaaagagagttcccccttattcctgcgaaggataaactgtttttagtaaaaatcagaaaaagggaacagcgatgcaggaaaatagtcctttgcttcagctacaaaacgtaggatatctggcgggtgatgcgaagattcttaataacatcaatttttcgctgcgtgctggcgaatttaagttaattaccggtccttctggttgtggcaaaagtacgctgctaaaaatagttgcttcattgatcagcccaaccagcggaacgttactgtttgaaggtgaggatgtcagcacactaaagccagaaatctaccgccaacaagtctcttactgcgcccagacaccgacgctgtttggcgatacggtatacgataatctgatctttccctggcagatccgtaaccggcagcctgacccagccatttttctcgattttctcgaacgcttcgccttgccggacagcattttgacgaagaatatcgccgagctatctggtggtgaaaaacaacgcatctcattgattcgtaacctgcaatttatgccgaaggttttattgctggatgaaataaccagtgcgctggatgaaagtaataaacataacgtcaatgagatgatccatcgttatgtgcgcgagcaaaatattgccgtgctgtgggtgacacacgataaagacgaaattaatcatgcggataaagtgattacactgcaaccgcatgccggagaaatgcaggaagcacgctatgaactcgcataatattactaacgaatcattagcactggcattaatgctggtggtggtggcaatcttaattagccataaagaaaaactggcgctggagaaagatattctctggagcgtcgggcgagcgataattcagctgattattgtcggctatgtgctgaagtatattttcagcgtggatgatgccagcctgacattattgatggtgttatttatctgctttaatgcggcgtggaacgcgcaaaaacgcagtaaatatattgctaaagcttttatctcatcgtttattgccattacggtcggggcgggaattaccctggcggtgctgattctctcagggtcgattgaatttatcccgatgcaggtgatccctatcgccgggatgattgccggtaacgccatggtagcggtggggttgtgttacaacaatttagggcaacgggtcattagcgaacagcaacagattcaggagaaactgagtcttggtgcgacgccgaagcaggcttcagcgatattgattcgcgacagtattcgcgcggctttaattccgacggtcgattcagcaaaaacggttggcttagtgagtttaccaggaatgatgtccgggctgatatttgccgggattgatccggtgaaggcgattaaatatcagattatggtgacctttatgctgctctcaaccgccagcttgtcgaccattattgcctgctatttaacctatcgtaagttttataattcgcgccaccagttggtggtgacgcaattgaagaagaaatgatgcgatgccggatgcgcagcatcgcatccggcgttgtggttcatgtgccgatcaacggaatatcaatacaacaatgcatacagctggcggcgatacttcgacgccagtgcatcacccgtacccagcgcagcgaggatctcctggaacgttttacgcgtctgaccgtctgcggcggtgagatctttacgcagatgcccgaacagcaactccagcgcctcttcattgcgcccaacctgatgcagttgcagcgccagttgcgtcgccagtgcggcatcttctggattctccgccacctgctgttgcaactgttgaatttccggcgtatcagccgcctgcttcagcagttcgatttgcgccaccagcccctggtagcgggtgtcctgatcctgcaacggaatggttttcagcaccgcttccgcatcttcagaacggttcagcgcaatcagcgtttctgccagcagcaggccgatctccccgttctgattcgacaactgccaggcgtctttcagcaatggcagggcatcggtgtaattgctttcctgcatcagttgcatcgcctgctgcgctttcagctcttcttcgcgcggcagcactttatccagcagggcgcggatcgcctcttccggttgcggcccctggaagccatctaccggttgcccgttctggaacagatacacggtcggaatcgcacgcagaccaaactgcgcggcaatcatctgctccgcgtcgcagtccagcttcgccagaataaattgcccgttgtactgcgccgcgaggctttccagaattggggttaactgcaaacagtgctggctacgttcagaccaaaaatagaacagcaccggagtggtcatcgactgttcaagaacctgttgcaggttagattcgttaatgttgacaatattttctacggacatggagtcgctctctgttgtcgatattttctttgacatgggggcttaagcgcgcgcttcaactcacccctgcaatattttgtccatcacgcgccccggcagcaggcgcttaagcaccattaccgcccaggtcaccagcgtcaccggatagcgcatcttcggcttctcgctaataaaagcatggcgtactttgtccaccaccgcttccggtcccaacgtaaagcgggcggcgatgccgggattttcgactggtttatcactttgcgtctggttgacgttgtcggtgaagcgagtacgaatgggaccgggttcgatcaggctgactttaattccgctgtggcgcagctccatgcgcagtgcatctgaccacgcctccagcgcatatttactggccgcgtaagcgccacgacccggcgtggagattaatcccatcaccgatgatgtcatcacaatacgcccttcaccgtgcggtaacatcgcgggtaacaggcgcatggtgagctggtgtgcgccgaaaaagttggcggaaaactgctgttccatctgcgcacggctgatggtggaaagggggccatacatgccgaatccggcattgttaaagatcccatacagacaattatcggtcagggcgatcacctcgtcggctgcgcgatcaacactttctggtgaatccagatcgatcaacacgccggtaaatcccatgctgttcatgcgctcaacatcatccggtttccggcaacctgccagcacatgaaaaccctggcgttttaattcgagcgcgctttccaggccaattccactggaacatccggtaattaagaccgatttttgcataactttacctgtcaggatctccgttgctttatgagtcatgatttactaaaggctgcaactgcttcgccatccagtcggcaataaacggctgggcgtcgcggttgggatgaataccgtcatcctgcatccattgtggcttgaggtagacctcttccataaaaaagggcagcagcggaacatcaaactctttggcgagtttggggtaaatggcgctaaaggcttcattataacggcgaccatagtttgcaggcagacgtatttgcattaacaatggttcagcgttggcggctttgacatcctgcaaaatctggcgcagcgtttgctcggtttgctgtggctgaaaaccacgcaaaccgtcattgccgcccagttcaaccagcacccaacgcggctgatgctgtttcagcagagccggaaggcgcgccagtccttgttgcgaggtgtcgccgctgatgctggcattaactaccgacgttttactctgccacttatcattcaacaaggcaggccaggccgcgctggcagacattcgatacccggcgctcaggctatcacccagaatcaataacgtgtccgctgcggcggcacggaaggttaacaggaccaggaacaggaagggcaaatgccagcggaaaacattgttgaagttcatcatcttaagaagtccgtcggtcagggggagcatgaactctccatcctcaccggagttgagctggttgtcaaacgtggcgagaccatcgcactggtgggcgagtcgggatcgggtaagtcaaccttgctggcgatcctcgccgggcttgatgacggcagcagtggcgaagtgagtctggtgggacaaccgctacataatatggacgaagaagcgcgggcaaagttgcgcgcgaagcacgtcggctttgtttttcagtcatttatgttaattcctacccttaacgcgctggaaaacgtcgagcttccggctctgctgcgcggtgagagtagcgcggaaagtcgtaacggggcgaaagcgttgctcgaacagttagggctgggtaaacgtctggatcatcttccggcacagctttccggcggtgaacagcaacgagtggcgctggcacgagcctttaatggtcgacctgatgtgctgtttgccgacgaacccaccggcaaccttgaccgccagacgggcgataaaattgccgacctgctgttttccctcaaccgtgaacatggcaccacgttgattatggtgacccacgacctgcaactggcggcacgctgcgaccgctgcttacggctggtgaacgggcagttgcaggaggaagcatgattgcacgttggttctggcgcgaatggcgttcgccgtcgctattaattgtctggctggcgctaagcctggcggtggcctgcgtgctggcgctgggcaatatcagcgatcgcatggagaagggcttaagccagcaaagccgtgagtttatggcgggcgatcgggcgttgcgcagttcacgcgaagtgccgcaagcgtggctggaggaagcgcaaaagcgcggcctgaaagtcggcaagcagctgactttcgccacaatgacctttgcaggcgacacaccgcagctggcgaacgtcaaagcggtggatgatatctacccgatgtatggcgatctgcaaactaatccccctggcctgaaaccgcaggcgggcagcgtattgctggccccacgcctgatggcactgcttaacctgaaaacgggcgacaccattgacgtgggcgatgccaccttgcggattgccggagaagtgattcaggaaccggattccggttttaaccccttccagatggctccgcgtctgatgatgaatctggcggatgtcgataaaaccggagccgtgcagccggggagtcgggtcacctggcgttataaattcggcggcaacgagaaccagctcgacggctatgagaaatggttgttacctcagcttaaacccgaacaacgctggtacggtctggaacaggacgaaggcgcgctggggcgatcgatggaacgctcgcaacagttcctgctgctttcggcgcttctgaccttgctgctggcagtggcagcggtggcggtagcgatgaatcattactgtcgcagtcgctacgatctggtggcgatcctcaaaacgctgggggcagggcgagcgcaactgcgtaagctaatcgtcggtcagtggttgatggtgctgacgctttcagccgttaccggtggggccataggcctgttgttcgaaaacgtgttgatggtgctgctcaagcccgttctgcctgctgcactaccgccagccagcctctggccgtggctgtgggcgcttggcaccatgacggtcatctcgctgctggtggggctacgaccatatcgcttgttgctggcaacgcagcctttacgcgtattacgtaatgatgtggtagcgaacgtctggccgctgaagttttatctgccgattgtcagtgtggtggttgtgctgctgctcgccggattaatgggtggcagcatgctgctttgggcggtgctggcgggcgcggtagtactggctttgctgtgcggtgtgctgggctggatgctgctgaatgtacttcgccgcatgacgctgaaatcgctgcctctgcgcctggcggttagccgcctgttacgtcagccgtggtcaacgttaagtcagctttcggcattttcgctctcctttatgctgctggcactgctgctggtgttgcgtggcgatctgctcgaccgctggcagcagcagctacctccagaaagcccgaactactttttaattaacatcgccacagaacaggtagcaccgctaaaagcgttcctcgcggaacatcagatagtcccggaatcgttttatccggtggtgcgggcgcggctgacggcgattaacgataagccgacagaaggtaatgaagatgaggcgcttaaccgcgaactcaatcttacctggcaaaatacgcggcccgatcataatccgattgtcgccggtaactggccgccaaaagccgatgaagtgtcgatggaagaggggctggcgaaacgcttaaacgttgccctcggtgataccgtgacttttatgggcgatacccaggagttccgcgctaaagtgaccagcctgcgcaaagtggactgggaaagtctgcggcctaatttctattttattttccctgaaggggcattagacgggcaaccgcagagctggcttaccagtttccgctgggagaatggcaacggcatgttgacacaactcaaccgccagttcccgaccattagcctgttagatattggcgcgattttaaaacaggtcggtcaggtgctggagcaggtaagtcgggcgctggaagtgatggtggtactggtcaccgcctgcggtatgttgctgttgctggcacaggtgcaggtgggaatgcgtcagcgtcatcaggagctggtggtgtggcgcacactcggtgcggggaaaaaactgctgcgtaccacgttgtggtgtgagttcgccatgcttgggtttgtttccggcctggtggccgcaattggtgcggaaacggcgctggcagtgttgcaggcgaaagtgtttgattttccgtgggagccagactggcgattgtggattgttctgccgtgcagcggagcgctgctgctgtcgcttttcggcggctggctgggtgcgcgactggttaagggtaaggcgctgttcaggcagtttgcggggtgatgagagtaaataaggggcgttctggttgaatggaacgccttgtttaaattaattctacaatatgtttcattgatgatgttattgaattggtgatttcctatctttctattgctgatattaatctgaatcggtggagtttattgattttaaatatagccctacaaaaataactcagactaataaaatcataaatcatatgcgttgaatggatattatccatatagtgaatttgttgatgatgaattcatctgtgctaaaaatgttagtttaataaaatattgaaagtgacctgtaataacagttgttgttgattgagaacaaataagtttatgtgaaaaatatataaatacattagctggtcttgtgtgtcattttatttttttttgttgctaacacagggatatgaacaataactaaaagggcactttatatgagcggaaaaccagcggcgcgtcagggagatatgactcagtatggcggtcccattgtccagggttcggcaggtgtaagaattggcgcgcccaccggcgtggcgtgctcggtgtgtccgggcgggatgacttcgggcaacccggtaaatccgctgctgggggcgaaggtgctgcccggcgagacggaccttgcgctgcccggcccgctgccgttcattctctcccgcacctacagcagctaccggacgaagacgcctgcaccggtgggcgttttcggccccggctggaaagcgccttctgatatccgcttacagctacgtgatgacggactgatactcaacgacaacggcgggcggagcattcactttgagccgctgctgccgggggaggcggtgtacagccgcagtgagtcaatgtggctggtgcgcggtggtaaggcagcacagccggacggccatacgctggcgcggctgtggggggcgctgccgccggatatccggttaagcccgcatctttacctggcgaccaacagcgcacaggggccgtggtggatactggggtggtctgagcgggtgccgggtgctgaggacgtactgccagcgccgctgccgccgtaccgggtgcttaccgggatggcggaccgcttcgggcggacgctgacgtaccggcgtgaggccgccggtgacctggccggggaaatcaccggcgtgacggacggtgccgggcgggagttccgtctggtgctgaccacgcaggcgcagcgtgcggaagaggcccgcacctcttcgctatcttcttctgacagttcccgccctctctcagcctcagcgttccccgacacactgcccggtaccgaatacggccccgacaggggtatccgcctttcggcggtgtggctgatgcacgacccggcatacccggagagcctgcccgctgcgccactggtgcggtacacgtatacggaagccggtgaactgctggcggtatatgaccgcagcaatacgcaggtgcgcgctttcacgtatgacgcgcagcacccgggccggatggtggcgcaccgttacgcgggaaggccggagatgcgctaccgctacgacgatacggggcgggtggtggagcaactgaacccggcagggttaagctaccgctatctttatgagcaggaccgcatcaccgtcaccgacagcctgaaccggcgtgaggtgctgcatacagaaggcggggccgggctgaaacgggtggtgaaaaaagaactggcggacggcagcgtcacgcgcagcgggtatgacgcggcaggaaggctcacggcgcagacggacgcggcgggacggaggacagagtacggtctgaatgtggtgtccggcgatatcacggacatcaccacaccggacgggcgggagacgaaattttactataacgacgggaaccagctgacggcggtggtgtccccggacgggctggagagccgccgggaatatgatgaaccgggcaggctggtatcggagacatcgcgcagcggggagacagtacgctaccgctacgatgacgcgcacagtgagttaccggcgacgacaacggatgcgacgggcagcacccggcagatgacctggagccgctacgggcagttgctggcgttcaccgactgctcgggctaccagacccgttatgaatacgaccgcttcggccagatgacggcggtccaccgcgaggaaggcatcagcctttaccgccgctatgacaaccgtggccggttaacctcggtgaaagacgcacagggccgtgaaacgcggtatgaatacaacgccgcaggcgacctgactgccgttatcaccccggacggcaaccggagcgagacacagtacgatgcgtggggaaaggcggtcagcaccacgcagggcgggctgacgcgcagtatggagtacgatgctgccggacgtgtcatcagcctgaccaacgagaacggcagccacagcgtcttcagttacgatgcgctggaccggctggtacagcagggcggctttgacgggcggacgcaacgttatcattatgacctgaccggaaaactcacacagagtgaggatgagggacttgtcatcctctggtactacgatgaatcggaccgtatcactcaccgcacggtgaacggcgaaccggcagagcagtggcagtatgatggccacggctggctgacagacatcagccacctgagcgaaggccaccgtgttgccgtccactatggctatgacgataaaggccgcctgaccggcgaatgccagacggtggagaacccggagacgggggaactgctgtggcagcatgagacgaaacacgcatacaacgagcaggggctggcaaaccgcgtcacgccggacagcctgccgccggtggagtggctgacgtatggcagcggttacctggcgggaatgaagctgggcgggacgccgctggtcgagtatacgcgggacaggctgcaccgtgagacggtgcgcagcttcggcagcatggcaggcagtaatgccgcatacgaactgaccagcacatacacccccgcaggccagttacagagccagcacctgaacagcctggtatatgaccgtgactacgggtggagtgacaacggcgacctggtgcgcatcagcggcccgcgacagacgcgggaatacggctacagcgccacgggcaggctggagagtgtgcgcaccctcgcaccagacctggacatccgcatcccgtatgccacggacccggcgggcaaccggctgccggacccggagctgcacccggacagtacactcacagtgtggccggataaccgcatcgcggaggatgcgcactatgtctaccgccacgatgaatacggcaggctgacggagaagacggaccgcatcccggcgggtgtgatacggacggacgacgagcggacccaccactaccactacgacagccagcaccgcctggtgttctacacgcggatacagcatggcgagccactggtcgagagccgctacctctacgacccgctgggacggcgaatggcaaaacgggtctggcggcgggagcgtgacctgacggggtggatgtcgctgtcgcgtaaaccggaggtgacgtggtatggctgggacggagacaggctgacgacggtgcagactgacaccacacgtatccagacggtatacgagccgggaagcttcacgccgctcatccgggtcgagacagagaacggcgagcgggaaaaagcgcagcggcgcagcctggcagagacgctccagcaggaagggagtgagaacggccacggcgtggtgttcccggctgaactggtgcggctgctggacaggctggaggaagaaatccgggcagaccgcgtgagcagtgaaagccgggcgtggcttgcgcagtgcgggctgacggtggagcaactggccagacaggtggagccggaatacacaccggcgcgaaaagctcatctttatcactgcgaccaccggggactgccgctggcgcttatcagcgaagacggcaatacggcgtggagcgcggaatatgatgaatggggcaaccagcttaatgaggagaacccgcatcatgtgtatcagccgtaccgtctgccagggcagcagcatgatgaggaatcagggctgtactataaccgtcaccggtactacgatccgttgcaggggcggtatattactcaggacccgatggggttgaaagggggatggaatttatatcagtatcctttaaatccactacaacaaattgaccctatgggattattgcagacttgggatgatgccagatctggagcatgtacggggggagtttgtggtgttctttcacgtataataggaccaagtaaatttgatagtactgcagatgctgcgttagatgctttgaaagaaacgcagaatagatctctatgtaatgatatggaatactctggtattgtctgtaaagatactaatggaaaatattttgcatctaaggcagaaactgataatttaagaaaggagtcatatcctctgaaaagaaaatgtcccacaggtacagatagagttgctgcttatcatactcacggtgcagatagtcatggcgattatgttgatgaatttttttcaagtagcgataaaaatcttgtaagaagtaaagataataatcttgaagcattttatctcgcaacacctgatggacgatttgaggcgcttaataataaaggagaatatatttttatcagaaatagtgtcccgggattgagttcagtatgcataccgtatcatgattaattttagtgcttttattagtggggcctataaggagattcaatgaaatatagttcaatattttcgatgctttcattttttatactatttgcctgtaatgagacagctgtttacggttctgatgaaaacattatttttatgaggtatgtggaaaaattacatttagataaatactctgttaaaaatacggtaaaaactgaaacaatggcgatacaattagctgaaatatatgttaggtatcgctatggcgaacggattgcagaagaagaaaaaccatatttaattacggaactaccagatagttgggttgttgagggagcaaagttaccttatgaagttgcgggtggtgtatttattatagaaattaataagaaaaatggatgtgttttgaatttcctacatagtaaataatgctggcgctgatggatgcggatggaaacattgcgtggagcggggagtatgatgagtggggcaaccagctgaatgaagagaacccgcatcacctgcaccagccgtaccggctgccggggcagcagtatgataaggagtcggggctgtactacaaccggaaccggtactacgatccgttgcaggggcggtatatcactcaggacccgatagggctggaggggggatggagtctgtatgcgtatccgctgaatccggtgaatggtattgatccattagggttaagtcccgcagatgtagcgctaataagaagaaaagatcaactaaaccatcaaagagcatgggatatattatctgatacttatgaagatatgaagagattaaatttaggtgggactgatcaatttttccattgtatggcattttgtcgagtgtctaaattaaatgacgctggtgttagccgatcggcgaaagggctgggttatgaaaaagagattagagattacgggttaaatctgttcggtatgtacggcagaaaagtaaagctatcccattctgaaatgattgaagataataaaaaagacttggctgtaaatgaccatgggttgacatgtccatcaacaacagattgctcagatagatgtagtgattatattaatccagagcataaaaaaacgataaaggctttacaagatgctggctatctcaagtaatctatcaaagatgataatatttatttttgctattataatcattgttgttttatgcgtaattacttatctttatttatacaaagatgaatctcttgtaagtaaacattacataaactatatggcaataccagaaaatgatggagtttttacatggctcccagatttttttccgcacgtagcggtggatatatcaatatacacaaatgtagaagatgattatttttttcttatttttccctaacaaatgatgatgggggtaggtttaagaaaacattgacagtgagggccagggaacaagtggcgaaaatcgtatcaaagaatgatccagatacaaaaaaagtgtggtgtaaatatggtaagataccagggcaaggggatggtgtaaaccttttttttgttggtgaaattaatgttacgcattattttataacaaatattggagctggattgcctgatgcttgtgcagagtaattgcttgaattaagagtctatcccatatcgaagtcgtcaacttcgtagtgaggaaaagtaaaattcctgactgagaaaagacatgtcggctattgtgtaaagccatatagctcagacgatgaatatctactcgtattcagttgtttattgagggtgagttccgaccctgaaacaacaaataaaatgaacagtcagagagtttacatagaattgcactggtcttttacgatatctgacattgtgtaatacatattcagccatgcattaattaaaatgttacgtgtttaatgtgagtccctatctgaaaataaataatccttccggattaaaataaattcttgccgggaaagaaagaggaaataaaccattagcggaaaaccagcggcacgccagggtgacatgccccagtacggcggcccgatagtccagggttcagcgggggtactgatagtcgcgccgactgcatcgagaactccatacaactttttacggaacgtcacctgataaaatttgttcagtatcgtcttttgagattctcaaggttatggagtaaccagacagaacggacaccactgtcggagataaaaaccccctgtttacgcagctcgttgctggcccggtgctgaccatgtgtcgggaaagcgacggcgtaatcaacaacagcctgttcagttgcctcatcggtacggttcttaaggttaggagcgcggcgactacgattaatctgcgcatccacaccgccttcagcgaccagttcgcggtaacgataaaacgtatcacgcgaaacgcccatgattttacaggcttttgatacgttgctgagttcttcagccagattgagcaaaccggctttgtgtttgatgacgggattggcagtatgaagcatgagagttacctcttgttttggataaggattcgacactcatatcaaaaccggtaactctcaacctttcaaggccatgtgtcagatcaagtcgcgactaatacaaatacgtccctcattaccgcgccttaacccattccgccacttccgcccactcaccgcgaaagacaactttttccgcttttttctcaagctgatagcgatacatcgggtcgtaatattcttcaagtaacggcaccagccaggccagatgaccgtcggtgctgccggtggtgagttgcgttgtcagtgctgcatccagccttgcagccagttcgttatagcgctgtagccccagccgacgcttaatcgccgaaagtccgtgatgcaggtattcgcaatactcctgccagccctgttcgtcgccgtacgcgtgggtaaaatcatgatgcatacgcaagaaatactcttcgttcaggcgctcaagacggatctcaaacggatcttctaccaccgcaatcgccgcctgagtcattcgctcgcgcaggcattccggcaggtgattcgaaccgatcatccggctttcgtcttccagcacccacaggcgcaaattctgacgggcgtcggtttttagcatttcggcagccagcaggttttcaaaactcgcctggctaagttgtggttgtaacgtgcgaccaaacgccgaaccgcgatgacgcgccaacccttccagatcaacaccgttcggctgttgctgcactaacagcgttttaccgctgccggtacaaccgccaatcagcactatcggtttttgtgccagttcaatagtcgcctgaatcgcggtctggcgcagtgccttataaccgccttccaccagcggataatcaatccccgctgcatgcaaccagctttgcacaatatgtgagcgctgaccgccacgggcgcagcagagaataccttgcggattttgcaggcacgctgcccgccaggcgtccatgcgctgctgacgaatttcacccgccaccagtttatgtcccagcgccagcgctgcgtctgagccttgctgtttatagcaggtgccaacggcggcgcgttcatcgttattcattaacggcagattgatagcggcgggcattgcgccgtgctcaaactcgataggggcgcgaacatcaataatgggcgtatcagcaatcagcagggcacgatagtcctgttccgtgtgtctctcttgcatagttaaaagtgaacctcaaatcagcttgcgcgctattttacgcgccaacgcgcaaggaaacttgatttttaactgcgtgggttgccgaaaatttctaaaaatccgctgatttccggcctgcgctgggtaaacaaggtcacaatatcttctaccgctttgccgctgccaaatttgcgccatgccagactcaatggcgaaggagggcgcatcgttgggattacccggctgaccagttgttgattatcgatcattgactggcaaagcgattttggcaaaaaaccaatgccaacgcccgccagatgggcggcgattttcgtttccatatcgggaacaataatctctttttgccctggcaatcgccaggcgacgcgtttggttaaggtgcgggcgctgtcttcaatattgaccgccggaaagcgccgcaactgcgcttctgttagcggctcttcaacgttcgccagcggatgatccgccgccatgacaaagcgccattgcaccgatcctaagggatcaagactaaaggtatttgccagcgcctcagttcccgtgacgccgatagccagcgaaaaaccttcgtacaatagcgagtcccagacgcccatatagatttgtcgggagatgtgaaactgggtaaaggggtaacgctcattcagccacgccagcaactgggcgacggcctgggggttgtagagcaggttgttgatgacaatattcacctggcgttccacgccatcattcacctgttgcagctcgcttggcatactttccagccagctcagccagtctctggcctgggaaagtagatgctcgccagccgctgtcaacgtcacgctgcgagtcgtacggaaaaacagcgctactccggtattctcttccagaagtttaatgcgataactgatcgtcgccgtggttttacataatcgttctgccgcttttgaaaaacttcctgtttcagcaaccgcaatgaaagtccgcaaggtttctggatcgaacatcttcaggtatccccttttaaatccgcaagttgcgtgattttcttatcctctgatttatcagtatttttacatgataaccctgttcaatttgtggactaaatctagttttggaaaaatattccaacttttgtattgatgttgttctcttaaggttttagattgcctgttattgaaaccaagctgaccggtcggcggtggttgaacggaattatgttacaaggacaaaaagatgaaacttcaggtattaccgttaagtcaggaagcctttagtgcttatggcgacgtaatcgaaacgcagcaacgggattttttccatattaacaatggcctggtggagcgttaccacgatttggcgctggttgagattcttgagcaagactgtacgcttatcagcattaaccgcgcgcaaccggcgaatctgccgctgaccattcacgaactcgaacgtcatccgctgggtactcaggcctttatcccgatgaaaggtgaggtgtttgtggtggtcgtggcgttaggtgacgacaaaccagacctgtcaacgctgcgggcgtttatcaccaacggcgaacagggagtgaattaccatcgtaacgtctggcatcacccacttttcgcctggcagcgcgtcaccgattttctgaccatcgatcgcggcggcagtgacaactgtgatgttgaaagtattcctgaacaggaactctgttttgcgtgacgcctgcaaccgacttgcataagataaactaattgttcattgtttatgctcacttgtaggtcggagttaacgtaggtatgacggaagttagacggcgcggcaggccaggacaggcggagcctgtggcacagaagggcgcacaggcgttagagcggggaattgcgattctgcaatatttggaaaaaagtgggggaagttcgtcggttagcgatatttctctcaatctggatttgccgctctccacgacctttcgcttgctgaaggttttacaggcagcggattttgtctatcaggacagtcaattaggctggtggcatataggattaggtgtctttaacgtcggtgcggcgtacatccataaccgcgatgtcctctccgtcgccgggccgtttatgcgccgcctgatgttactttccggcgaaacggtcaatgtcgcgatccgtaacggcaatgaagcggtattaattggtcagttagagtgtaaatcgatggtcaggatgtgtgcgccactgggcagtcgtctgccactgcatgcttccggtgcgggcaaagcgctgctttatccgctggcggaagaggagttgatgagcatcattctgcaaaccggtttgcagcagtttacgccaactacgcttgtggatatgcccaccttgctgaaggacctggaacaagcgcgtgaactgggctataccgtagataaagaagagcatgttgtaggtctgaattgcatagcttcagcaatttacgatgatgtcggtagtgttgttgccgctatctccatctccgggccttcatcaagactgacagaagatcgttttgtcagtcagggtgagctggtcagagacaccgcccgcgatatcagcacggcgttgggactgaaagcacatccataatgtctgtcgcatcccgctctgcggagcgggtttttttgacaaaatttgaaagttggaaaaattttccaataaatagaggtaggaataaaatggcaaaaatgagagccgttgacgcggcaatgtatgtgctggagaaagaaggtatcactaccgccttcggtgttccgggagctgcaatcaatccgttctactcagcgatgcgtaagcacggcggtattcgtcacattctggcgcgtcatgtggaaggtgcttcgcacatggcggaaggttatacccgcgcaacggcagggaatatcggcgtatgtctggggacttccggtcctgcgggcacggacatgatcaccgcgctctattccgcttctgctgattccattcctattctgtgcattaccggccaggcaccgcgcgcccgtctgcataaagaagattttcaggccgtagatattgaagcaattgctaaaccggtcagcaaaatggcggttacagttcgtgaagcggcgctggtgcctcgcgtgctgcaacaggcatttcacctgatgcgttctggtcgtccgggtccggtactggtggatttaccgttcgacgttcaggttgcggaaatcgagtttgatcctgacatgtacgaaccgctgccggtctacaaacctgctgccagccgtatgcagatcgaaaaagctgtagaaatgttaatccaggccgaacgtccggtgattgttgccgggggcggggtaattaatgctgacgcagctgcactgttacaacagtttgctgaactgaccagcgttccggtgatcccaacgctaatgggctggggctgtatcccggacgatcatgaactgatggccgggatggtgggtctgcaaaccgcgcatcgttacggtaacgcaacgctgctggcgtctgacatggtgtttggtatcggtaaccgttttgctaaccgtcataccggctcggtagagaaatacaccgaagggcgcaaaatcgttcatattgatattgagccgacgcaaattggtcgcgtgctgtgtccggatctcggtattgtctctgatgctaaagcggcgctgacactgctggttgaagtggcgcaggagatgcaaaaagcgggtcgtctgccgtgtcgtaaagaatgggtcgccgactgccagcagcgtaaacgcactttgctgcgcaaaacccacttcgacaacgtgccggtgaaaccgcagcgcgtgtatgaagagatgaacaaagcctttggtcgcgatgtttgttatgtcaccaccattggtctgtcacaaatcgctgcggcacaaatgctgcatgtctttaaagaccgccactggatcaactgtggtcaggctggtccgttaggctggacgattccggctgcgctaggggtttgtgccgctgatccgaaacgcaatgtggtggcgatttctggcgactttgacttccagttcctgattgaagagttagctgttggcgcgcagttcaacattccgtacatccatgtgctggtcaacaacgcttatctggggctgattcgtcagtcacaacgcgcttttgacatggactactgcgtgcaactcgctttcgagaatatcaactccagtgaagtgaatggctacggtgttgaccacgtaaaagtagcggaaggtttaggttgtaaagctattcgggtcttcaaaccggaagatattgcgccagcctttgaacaggcgaaagccttaatggcgcaatatcgggtaccggtagtcgtggaagttattctcgagcgtgtgaccaatatttcgatgggcagcgaactggataacgtcatggaatttgaagatatcgccgataacgcagcggacgcaccgactgaaacctgcttcatgcactatgaataagggagataaataatgttacgtttctctgctaatttatcgatgttatttggagaatatgattttctcgcccgttttgagaaagctgcgcagtgtggttttcgcggcgttgaatttatgtttccttatgactacgacattgaagaattaaaacatgtgctggcgagtaataaactcgaacatacgctgcacaatttaccggcgggtgactgggcggcgggggagcgcggtattgcctgtattcctggccgtgaagaagagtttcgggatggcgtagcagcagcgattcgttatgcccgtgcgctgggtaataaaaaaattaactgtctggtcggtaaaacgccggctggtttcagcagtgaacagattcacgcaacgcttgtagaaaacctgcgttatgccgcgaatatgctgatgaaagaagatattttattactgattgaacctattaaccattttgatattcctggtttccatctcaccggaactcggcaggcgctgaaattgattgatgatgttggttgctgcaatttgaaaattcagtatgacatttatcatatgcagcggatggaaggtgaattaaccaacaccatgactcagtgggctgataaaattggtcacctgcaaattgccgataatccgcatcgcggcgaaccgggaaccggagaaattaattatgattatctctttaaggtaatcgaaaattctgactacaacggttgggttgggtgtgaatataaaccccaaaccaccacggaagccggtttacgctggatggatccgtaccgttaaaacgtaacgctattcagacaatgcttttttaggccgctaagttggcaggggatcgtgttgtctgaattcaggaaaagcgaaatttaaaagaggttaattatgaaactgggatttattggcttaggcattatgggtacaccgatggccattaatctggcgcgtgccggtcatcaattacatgtcacgaccattggaccggttgctgatgaattactgtcactgggtgccgtcagtgttgaaactgctcgccaggtaacggaagcatcggacatcatttttattatggtgccggacacacctcaggttgaagaagttctgttcggtgaaaatggttgtaccaaagcctcgctgaagggcaaaaccattgttgatatgagctccatttccccgattgaaactaagcgtttcgctcgtcaggtgaatgaactgggcggcgattatctcgatgcgccagtctccggcggtgaaatcggtgcgcgtgaagggacgttgtcgattatggttggcggtgatgaagcggtatttgaacgtgttaaaccgctgtttgaactgctcggtaaaaatatcaccctcgtgggcggtaacggcgatggtcaaacctgcaaagtggcaaatcagattatcgtggcgctcaatattgaagcggtttctgaagccctgctatttgcttcaaaagccggtgcggacccggtacgtgtgcgccaggcgctgatgggcggctttgcttcctcacgtattctggaagttcatggcgagcgtatgattaaacgcacctttaatccgggcttcaaaatcgctctgcaccagaaagatctcaacctggcactgcaaagtgcgaaagcacttgcgctgaacctgccaaacactgcgacctgccaggagttatttaatacctgtgcggcaaacggtggcagccagttggatcactctgcgttagtgcaggcgctggaattaatggctaaccataaactggcctgatacccgcaataaaaatggccgatatcagaaaatgaatcggccagcaatattaaaaaagaaagcagccaaagatgttgcttcagtattaaaaataatatttttattttatttgttcctcatagctagattaaaacaacgttattcgatacgtgaaattaagagggatttatggaacatcagagaaaactattccagcaacgcggctatagcgaagatctattgccgaaaacgcaaagccagcggacctggaaaacatttaactattttaccttatggatgggttcggttcataacgttcccaattatgtgatggtcggcggcttttttattctcggcttgtctacctttagtattatgctggcaattatcctcagcgcctttttcattgccgcggtaatggtattaaacggtgctgcgggcagtaaatacggtgtgccttttgccatgatcctgcgtgcttcttacggtgtacgtggtgcactgtttcccggattattaaggggcggaattgccgccatcatgtggtttggtttgcaatgttacgcggggtcactggcctgcttgattctgattggcaaaatctggccgggatttttaactctcggtggtgatttcactctgttaggcctttctctaccgggcttaattactttcttaatcttctggctggtcaacgttggtataggttttggcggtggcaaagttttaaataaattcactgccattcttaacccgtgcatctatatcgttttcggcggtatggcgatttgggcgatttcactggtcgggatcggtccaatctttgactacattccgagcggtattcagaaagcagaaaacggtggcttcctgttcctggtggtgattaacgcggtagttgcggtctgggcggcaccggcggtgagcgcatccgactttacgcaaaacgcccactcgtttcgtgagcaggcgctggggcaaacgctgggtttagttgtggcctatattctgtttgcggtcgccggggtatgtattattgccggagccagtattcactacggcgctgatacctggaacgtgctggatattgttcagcgttgggacagcctgttcgcctcgttctttgcggtactggttattctgatgacaactatctccactaacgcgaccggtaatattattccagccggttatcagattgccgccattgcaccgacaaaactgacctataaaaacggcgtactgattgccagtattatcagcttgctgatctgcccgtggaaattaatggaaaatcaggacagcatttatcttttcctcgatattatcggcggaatgcttggtccggtaattggtgtcatgatggcgcattattttgtggtgatgcgcggacaaattaatcttgatgaactgtataccgcacctggcgattataaatattacgataacggttttaacctcactgcgttttcagtaactctggtggccgttattttatctcttggcggtaagtttattcactttatggaaccgttatcgcgtgtttcatggtttgtcggcgtcatcgtcgcctttgcggcctacgccttattaaagaaacgtacaacagcagaaaaaacaggagagcaaaaaaccataggttaattaatcccgatattgaacattgagttaaaaaccaatctgtattttacaaggagtttgttatgtcttttgatttaatcattaaaaacggcaccgttattttagaaaacgaagctcgcgttgtagatatcgccgttaaaggcggaaaaattgctgctatcggtcaggatctgggcgatgcaaaagaagttatggatgcgtctggtctggtggtttcgccgggcatggttgatgcgcacacccatatttctgaaccgggtcgtagccactgggaaggttatgaaaccggtactcgcgcagcggcaaaaggtggtatcaccaccatgatcgaaatgccgctcaaccagctgcctgcaacggttgaccgcgcttcaattgaactgaagttcgatgccgctaaaggcaagctgactattgatgcggcacaactcggtggcctggtgtcttacaacatcgaccgtctgcatgagctggatgaagtgggcgttgtcggcttcaaatgcttcgttgcgacctgtggcgatcgcggtatcgacaacgacttccgtgatgtaaacgactggcagttcttcaaaggtgcgcagaagctgggcgaactgggtcagccggtgctggtgcactgcgaaaacgcgctgatttgtgacgaactgggcgaagaagcgaagcgtgaaggtcgcgtaaccgctcatgactatgtggcttcgcgtccggtatttaccgaagtggaagcaattcgccgcgtactgtatctggcgaaagttgctggttgccgtctgcacgtttgccacgtcagcagcccggaaggtgttgaggaagtgactcgtgcacgtcaggaaggtcaggacgttacttgtgaatcctgcccgcattactttgtactggataccgatcagttcgaagaaatcggtactctggcgaagtgttcaccgccgatccgcgatctggaaaaccagaaaggcatgtgggaaaaactgtttaacggtgaaatcgactgcctggtttccgaccactctccatgcccgccggaaatgaaagccggtaacatcatgaaagcatggggcggtatcgccggtctgcaaagctgcatggacgtgatgttcgatgaagcggtacagaaacgcggtatgtctctgccaatgttcggcaaattaatggcgactaacgcagcagatattttcggtctgcagcaaaaaggccgtatcgccccaggaaaagatgccgacttcgtcttcattcagccgaatagcagctatgttcttaccaatgacgatctggaatatcgccacaaagtcagcccgtatgttggccgtaccattggcgcgcgtatcacgaaaaccatcttacgtggtgatgtgatttacgacattgaacagggcttccctgttgcgccgaaaggtcaatttatccttaaacatcagcagtaatctggcccctgcaatgcccgtccttgcggcgggcattctccggttaaggtgtgtttatgttcaattttgcagtcagccgcgaaagcctgttatcaggatttcagtggtttttctttattttttgcaacacggttgtggttcctcctacgctactttctgcttttcagttgccgcaaagtagcctgcttacgctcacgcaatatgcttttcttgctaccgcactggcctgcttcgctcaggcgttttgcggtcatcgtcgcgctattatggaagggccaggtggcctgtggtggggaaccatccttactatcacccttggtgaagcatcgcgcgggacaccgatcaacgatatcgccaccagcctggcagtggggattgcactctccggcgtgctgacgatgttgattggttttagcggattaggccatcgcctggcacggttatttacgccgtcggtgatggtcttgtttatgttgatgctgggcgcgcagctgaccactatctttttcaaaggtatgctcgggctgccgtttggcatagccgacccgaattttaaaattcagttaccgccgttcgcgctctcggtggcggtgatgtgcctggtactggcgatgattatcttcctgccgcaacgttttgcccgttatggcctgctggtcggcaccataaccggctggttgttgtggtacttttgctttccttcttcgcactcgctctccggtgagttgcactggcagtggttcccgctcggcagtggcggtgctttgtcgccgggaattattctgacggcggtgattacaggtctggtaaatatcagcaatacctacggtgcgattcggggcacggatgttttttatccgcagcagggcgcagggaatacgcgttatcgtcgtagctttgtggcgaccggatttatgacgctgataaccgtaccgctggcggtaattccattttcaccgtttgtttcatccattggtttattaacccagactggcgattacacgcggcgttcgtttatttatggcagcgttatttgcctgctggtggcgctggttcctgcactcacgcgactgttttgcagtatccctttacccgtgagtagtgcggtcatgctggtttcttatctgcctttactcttttccgcgctggtgtttagccagcaaataacgtttaccgctcgcaatatttatcgactcgcattgccgttatttgtcggcatatttttaatggcattaccgcctgtgtatctgcaagaccttccattaacgcttcgtcctctgctcagtaacggcttattggtcgggattttactggctgttcttatggataaccttattccgtgggaacgcatcgaataatttgttgaaaaaggattgataatgaagattgtcattgcgccagactcttttaaagagagcttaagtgcagaaaaatgttgtcaggcaattaaagccgggttttcgaccctctttcccgatgcgaactatatctgtttgccgatagcggatggcggcgaagggacggtggatgcgatggtcgccgcgacgggcggcaacatcgtgacgcttgaagtctgcgggccgatgggcgaaaaagtgaatgctttttatggccttaccggcgacgggaaaacggcggtgattgagatggcggcagcaagtggcctgatgctggtcgcgcctgaaaagcgtaatccgttgctggcctccagttttggtacgggggagttaattcgtcatgcgctggataacgacattcgccatattattctcggcattggcggcagtgcgacggtcgacggcggtatgggcatggcgcaggcgctcggtgtgcgtttccttgatgccgacggtcaggcgctggcggcaaacggtggtaatttagcgcgcgtggcaagcattgagatggatgaatgcgatccgcgtctggcgaattgccatattgaagtagcatgtgacgttgataacccgctggtaggggcacgcggcgcggcggcggtgtttggcccgcaaaaaggggcaacgccggagatggtcgaagaacttgaacaggggctgcaaaattacgcccgtgttttacaacagcaaactgaaattaatgtctgccagatggcgggcggcggcgctgcgggcggtatgggtattgcggcggcggtatttctcaatgcggatattaaaccgggcattgaaattgtgttgaatgcggtcaatcttgcgcaggcagtgcagggcgcagcactggtgattaccggggaagggcgcatcgactcgcaaacggcaggcggtaaagcgccgctgggtgtggcgtcggtggcgaagcagtttaatgtaccggtgattgggattgctggcgtattgggtgatggcgtggaagtggtgcaccagtacggcattgacgcggtattcagcattttgcctcgtctggcacctttagccgaagtgctcgccagcggtgaaaccaatctcttcaacagcgcgcgaaatattgcctgcgccattaaaataggtcagggaattaaaaactaacccttacctttaaagcggatgcgatttatatcgcataagagtgcagtactcatgccggatgcggcatgagtaccatatccttcctgaaaatcgcgcaaattctatatattgcagagatcatgtaggcctgataagcgaagcgcatcaggcaatgttacaaaaaaagccacggtataaaccgtggcaaaatccaacatagctaaaaataatcaggcgagtggtatgacttaaatctctacgtcgcggttacaatctttcgagtaaatatagctgaacgcttcaccacgccctacaccataaccagcctgtaaagaataagcgcccataaagatgtaatcgccttttttcaccgggatccagttattgtcgaggttataaaccccctgaccggaaagaatataggcaccgtgttcctgaacgtgtgtttcgatataaccgtggctggcacctggtgcaaaagagaggatatgcatgttcatatcaaaacctaactctttgggcagaaaatccagcagaataacatcgtccatgccttcataatgaatgcgttccagttcgctggcattgccagaaaccagccacggtgcatagccttctaccggaacatagcggcgcttatataaaaagatttggctgtcttcggcctgggcgttaacaaacgtcattaaggagcctggcgggcaataaagatagccaccttcgcttaaggcaaatgttttgccttcggctttggcagtgatatttccagagatcacatacaggaacgtttcaatgccttcgccaccgaagccctgttggttgccaccgttttgatgcagtgtgaccagataatcaacaaaagaggcacccagctttggcgtggagaggattgtcgcgtcacaattttcaaagcccggaataatattttttaccagaccatccggggttaacagtgcgaaattaccgtgtttaacaatcgcacggttagccagtaaatcttcgcggtaaccggtgacgttatttaaatatcccatttatgactccttatttctgccaggcaagttgataaagcatgagtgccaacgttttgaccccttcggcaaggtcggtaatattggtgcgttccgccgggttatggctgatcccgttgatgctggggataaaaatcatgcaggttggtacgcgaggcgcgaaaatttgcgcgtcgtgcccggcaccactgtgcatcacccggtaattcagtttttctctttcacacaattctgtcagggtggcgaccagctccttattcatcggcacgggttcttcgtccatccataaatcgatatcaataccaatgtccatttcatcgcaaatcgcccgcatgtcgttttctaactgttgggtgaaatcgcgcagcacggcagcgtcggtatgacgacaatcaatggtgaacgtggttttacccggcaccacatttaccgtattcgggcgcggctctactttgccaaaggtcagaaccagcggatcgcccatccttttcgctttttcgaccgactgatggcaaatgcgactgaaagcgtaaactgtatcacgacgataacccatcggcgtggtgcctgcatggtttgattcgccgttcagcgttaccgtataacgacgctgcccgacaattgcattcaccacgccaattgattgcccattactttccagcacacagccctgttcaatatgcagttcaacaaaggctttaatatcctgacgcggagttagtggggcgttcggaagagtaaatccgcaagccttcatcgcatcgacaaaactatttcctttggcatcacagatattccgcacgtcgtcaggattcgccagcccaaaaatatttttactgccccagaagacatacgggaagcggctgccttcttcttctgccatcgccaccacttcgaccgtacgtagcggcgcgccgtattgcgttttcagccagtcaattgccagccacgccgccagcgcgccgaattgcccgtcaaggttaccgccgttaaccacggtatcgatatgcgaaccgctcagaaccacttcctgtggatattcggtgccattcaggcgaccgtataaattccccacttcatcgaaacgtgtttccagcccgcttgctgccattctttttttaaattgctgctgggtttccagccattccggcgaataaagtaaacgggtcatcccacccgctgggtcagcgccaaaagaggaaagccagggcagcgtttcttctatagcttgacggaaatgtgtaatcataagaaagtcctgtctcaataattattgcgcaaagggatttttcgtttcgtatgacgtgttataaagcgcgtcggaaattaaatactggtaaatatcatcaacaatttcgatgccttcgacggcggctttgcgttgtttaatatcctgatcctgtccgggataataaacctgattaaaaccgggcgcgggggtaatggcatttaattcgcgcatggtctggctaagatgttgacggaataattcgctggaggagaaaaagttcggattaataactatatgtaattgccccaaattacgccctgcgtgtaaatcgtcatacatcgaactaacctgtcgcccgaacggtaagccgagtaagacgcctgagaggacgtcaatcatcatcatcaggccatacccttttggcccggcggcggggagcagagcatgtaccgcgaacggatcggttgttggtacaccgtttttatcgaccgcccaggtatccgggatagacatattacgcgagcgggcgtcgagcacttttccccatgcctgtacggtagtcgccatatcaaaggtaaggatctcgtcgccttctcccggcgcggcaaaggccagggggttagtaccgtagtaaatttccgcgccgccaaacggcaccaccattggatcggactggcacatcgaaatgccaatgaatccggcgcgggctgcctgctgcacaaaataagagattgcgccgctgtgacccatccggctgataccgaccaccgcaacgccattttgctgggcggttttgatggcatgttccatacccattttcgccgcgacctgtccggcggcattgtcggcatgtaaaattgccgagcacggcccggtttcctcaagacgaaactccggttcgcggttggtgccgccttttgaaatgcgttccgcgtagtattccacgcgcaccgcgccatgagagtggatccctctggcatcggcgtaaaccaatacttcagccacggttgcagcgtgctcacgttttaacccagcctggcagagtttattctcaattagctggtggagtgtttcccgactgattttcatctgtcttcctttttaacgacggtgtgaagcatgactgcaattaacatacagggaaaatatctggattatgtgatccagacaggcaaaaaaatatagttagaatttatttgataatccgctcacttttaacctgatttttaaaacaacaacgcttattaaaaaataatgagtaatagcctggtggttatttgaattcttttgttaataattcctgtgtgatattcatcaccttatttactcgttgtcatcgataccgtaatcgccacattaacactgctcgtgcaattgccatgggtgcaatttttaaggagttgttatgatccacgcctttattaaaaaagggtgttttcaggattcggtcagtttaatgattatttcacgaaaactcagcgaatcagaaaatgttgatgatgtttccgtaatgatgggtacgcccgccaataaagcgttattagataccacaggtttctggcatgacgattttaataacgccacgccgaacgatatttgcgtggcaattcgtagcgaagcggcggatgcggggatcgcgcaggcgattatgcagcagcttgaagaggcgctaaaacaactggcgcaggggtcaggcagcagccaggcgttgacgcaggtgcgtcgctgggacagtgcctgtcagaaattacccgatgccaatctggcgctgatttcagtggctggcgagtatgcggcggagctggcaaaccaggcgctggatcgcaacctcaacgtgatgatgttctccgataacgtcacgctggaagatgaaatccaacttaaaacccgcgcgcgggaaaaaggcttgctggtgatggggccggactgcggtacgtcgatgattgccggcacaccgctggcttttgctaacgtgatgccggaaggcaatattggcgtcattggcgcttccggtaccgggattcaggagctgtgttcgcagattgcgctggcaggggagggaattactcacgcgattggccttggcgggcgcgacctcagccgtgaagtgggcggcatcagtgcgctaacagcgctggaaatgctcagtgcagacgagaaaagcgaagtgctggcatttgtttcaaaaccacctgccgaagctgtgcgtctgaaaattgttaatgccatgaaagcaaccggcaaaccgacggtggcgctgtttttaggttataccccggcggtggcccgcgacgagaatgtctggtttgcctcctcgctggatgaggccgcacgcctggcttgcctgctttcacgcgtcacggcgcgacgtaacgcaatagcgcctgtcagcagcggatttatttgcggtttgtataccggcggtacgctggctgccgaagcggcgggattacttgccggacaccttggcgtggaagccgacgatacccatcaacatggcatgatgctggacgccgatagccaccagattattgacctcggcgatgatttctacaccgtcgggcgtccccatccgatgatcgacccaaccttacgcaaccagttaattgccgatctcggcgctaaaccgcaagtgcgcgtgttgctgcttgatgtcgtgattggcttcggtgcgaccgccgatcctgccgcctcgctggtgagcgcctggcaaaaagcctgtgccgcgcgtttagataatcaaccactgtatgccattgccacggtgacaggcactgaacgtgacccgcaatgccgctcgcagcaaatcgccacgctggaagatgcggggattgcggtcgtgagttcgctaccggaagccaccttgctggcggcagcgttaattcatccgctctcgcctgccgcacagcaacacacaccgtcattactggaaaacgtcgccgtgattaacatcggattacgcagctttgcgctggagctacaaagcgccagcaaaccggttgtgcattaccaatggtcgccagtcgccggtggcaataaaaaactggctcgtttattagaacgtttgcaataaggggttcccatgtttacatcagtggcgcaagccaatgctgcggttatcgaacaaattcgtcgcgctcgtccacactggctggatgtgcaaccggcttcttcacttatcagcgaactaaacgaaggcaaaacactgcttcacgccgggccgccaatgcgctggcaggagatgaccggacccatgaaaggggcgtgcgtgggcgcatgtctgttcgaaggttgggcgaaagatgaagcgcaggcgctggcaatactggagcaggggaagtgaacttcattccttgtcaccatgtgaatgccgtcgggccaatgggcggtattacttctgccagtatgccgatgctggtggttgagaacgtgaccgacggcaaccgggcgtactgcaacctcaacgaaggtatcggcaaagtgatgcgttttggcgcttacggcgaagatgtcctgactcgccatcgctggatgcgcgatgtgttaatgccagtattaagcgcggcgctggggcgcatggagcgcggtatcgatctcacggcgatgatggcgcagggcattacgatgggcgatgagttccatcaacgcaatattgcttcctctgcactgttaatgcgtgcgctggccccacaaattgctcgcctcgatcatgataaacagcacatcgccgaagtgatggatttcctcagcgtgaccgatcagttcttcctcaacctcgcgatggcttactgcaaggcggcgatggatgctggcgcgatgatccgcgcaggcagcatcgtcacggcaatgacccgcaacggcaatatgttcgggattcgggtaagcgggctgggcgaacgctggtttactgcgcctgtaaacactccgcaaggtctgtttttcaccggcttctcgcaggagcaggcgaacccggatatgggcgatagcgcgattaccgaaacctttggtatcggaggtgcggcaatgatcgcagcgcctggcgtaacgcgctttgtcggtgcgggtggcatggaagcggcaagagcggtatctgaagagatggcggaaatttaccttgaacgcaatatgcagttgcagatcccaagctgggattttcagggcgcgtgcctggggctggacattcgtcgcgtggtagaaaccggcattacgccactcatcaataccggtatcgcccataaagaggcggggatcgggcagattggcgcaggcaccgtgcgggcaccgctggcgtgctttgaacaggcgctggaagcactggctgaaagcatgggtattggttgaggaacgcgcaatgacgatcatccatcctctgcttgccagtagtagcgcaccgaattatcgccagtcctggcggttagcgggagtgtggcggcgggcgattaacctgatgacggaaagcggcgaactgttaacgttgcatcgtcagggtagtggtttcggccccggaggatgggtgcttcgccgtgcgcaattcgatgcgttatgcggtggattatgcggcaatgaacgaccacaggttgtggctcaagggattcgcctcgggcgtttcacggttaaacagccacagcgttattgtttgctgcgtattacgccgcctgcgcatcctcaaccacttgcagctgcatggatgcaacgcgcggaggaaaccgggcttttcgggccactggcgttggcggcaagcgatccgctgcctgctgagttacgccagtttcgtcactgttttcaggccgcgctcaatggcgttaagaccgactggcggcactggctgggtaaaggccccggattaacgccgagtcatgatgacacgctgagcggaatgctgctggcggcctggtattatggcgctttagatgcgcgctccggtcgtccgttttttgcctgttccgacaatctgcaactcgttaccacagcggtgagcgtcagttatttacgttatgccgcgcaaggatatttcgcctcgccactcctgcactttgttcatgctctgagttgcccgaaacgtaccgctgttgcgattgattcgctgctggcgctggggcatacgtcaggggcagatacgctgctggggttctggcttggccaacaattattacaaggaaaaccatgaaaacactggttgtggctcttgggggcaacgccttactccagcgcggtgaggcgctgacggcagaaaatcaatatcgcaatatcgccagtgctgtacccgcgctggcacgcctggcccgttcttatcggttggcgattgttcacggcaacgggccgcaggtggggctgctggcattgcagaatctggcgtggaaagaggtagaaccgtatccgctggatgtgctggttgcggaaagccaggggatgattggctatatgctggcgcagagtttgagcgcacagccgcagatgccgcccgtgacgacggtgctgacgcgcattgaggtttcgcctgatgatccggcgtttttgcagccagagaaatttattggtccggtttatcagccagaagaacaagaggcactggaagcggcttacggctggcagatgaaacgtgatggtaaatatttgcgccgggtggtggcgtctccgcaaccgcgtaaaattctcgacagcgaagccatcgagttgttgctcaaagaggggcatgtggtgatttgcagtggcggcggcggtgtgcctgtgacggatgacggagcagggagtgaagcagtgattgataaagatctcgccgctgcgttgctcgccgagcagattaatgcagatggactggtgatcctcaccgatgctgatgcggtatatgaaaactggggaacgccgcagcaacgtgccattcgccatgccacaccggatgagttagcgccatttgccaaagccgatggttcgatggggccgaatgtaacggcggtgagtggttatgtcagaagccgtggtaaacccgcgtggattggggcgttatcgcgaattgaagagacgctggcgggcgaagcggggacctgtatttcgctgtagtcgtaggcattagacatttgtgcctgatgcgacgcttgacgcgtcttatcaggcctacaaccggtgccgcatccggcaattggtgcacaatgcctgatgcgatgcttgacgcatcttatcaggcctacaatgggtaccggatcggtaggccggataaggcgtttacgccgcatccggcaagaatagagcaccagttaaccgaacttactctgcgcccaaatcacgccgctggcatattccggcggcagcagcgggattaaggcttccagcgtcgcagtcagacgcgatgtgtcgctgtcggtcaaattcagatgccccactttacgccccggacggacttctttgtcgtaccagtgcagatgcaccagcggcagtttcagccagtcataattcacatcgctaccaatcagattgatcatcaccgacggattattcaccactggttgcggtaacggcagatcggtaatcgcccgcagatgcagctcaaactggctgatgctggcaccgttttgtgtccagtgaccgctgttatgcacacgcggtgccagttcgttgatcaacagaccttgcggggtgacaaaacactccatcgccatcacgcccacatagcccagctcctgcataatcgccgacagcatctcttcggcttgcgcctgctgctgtgcgttggcctgcggaaaagcgacgctggtgcgcaaaataccgtcctgatgcaggttatgcgtcagcggataaaacacggtgctgccatcaaagccgcgcgcgccaaccagcgacacttcaccagagaagttaatgccctgctcgacaatacattcgccgtaacactctgccggtaactgttcggtttcatttgcgcgtaaacgccattgaccgcgaccgtcataaccaccagtgcgacgcttaacaatcgccagctcacctaaacgatcaaacaccgcaggccactcgctgcgttcggcaagtaactgccacggtgcagtcggcaggtggagcttatcgaaaagctgcttctgagtcagacggtcagcaataatcgggaacacatcgcggttcacaaaggccggatggcgcgccagctcgcgggttaatgcggtttccggccagcgttctatctcagcggtaatcacgctttgttgaaaaggcaccgccgccggttcagcgtccagcccgactggccagacagcaatgcctaacggttcgcctgcctgacgcagcatacggcctaactgcccgttaccgaggacgcaaacctgtttcatgccgcacctcgcgggtccgggttttccagcacttcgtcggtctgggctttgcgccagtcattcagacgctggtgcagttctttatcatgagtcgcaagaatttgtgctgccagtaacgccgcgtttgccgcgccagctttaccaatcgccagcgtacccaccggaatgccgcgcggcatttgtacgatggagtagaggctatcgacaccgctcagtgcggcgctctgtactggcacgcccagcaccggcaccagcgttttggcggcaatcatgcctggcagatgcgctgcgccgcctgcgcccgcaataatcacctgataaccgttctcttcggcgctttcggcgaagctgaacagtttatcgggggtgcggtgagcagaaaccacttcaacgtggtgcgggacattcaggatttcgaagatttcggcggcgaactgcatggtagcccagtcgcttttggaccccatcacgatggcgacacgcgccggattattgcgggaagacatgcgtcttaaaactcctgtggtgcacaactctcggctttagagggcacagagaatagcacggaaagagagcaaggaaaacggttgcgtggctgtgaaatcagcaaagttgcgggttttttaaaacggaaaatgaatcagctcaacgtcatccgccgtgactttcaccattgaaccttccgtatgccaggcacccagtaccacgcgaaaagcaggttgctgattggcgataagttcatgcaccgccgggcgatgggtatgcccgtggatcagccattgcacctgatgtttttccatcgcactgaccaccgcgttttggttaacgtccatgatcgccagcgatttactgctgttggcttctttgctgttcgcgcgcattcgcgcggcaatgcgtttgcgcacaaacaacggcagggcgaggaatagcgtctgcagccagggtttgtggaccttggcgcgaaaagcctgataacccgcgtcatcggtgcacagcgtgtcgccatgcataatcaacacccggcgaccataaagttcgagcaccttttcttccggcaataacgtcatgccactttcacgggcaaagcgtttgccgagcagaaaatcacggttgccatgaatgaaataacagggaacgccggaatcggacaccgctttgatcgccgccgccatcttgcgatggagtgggttgggatcgtcgtcgccaatccatgcttcaaacagatcgccaagaatatacagcgcgtcggccttgcgggcttcccccgctaaaaaacgcagaaaaccggcggtgatcgccggttcttccacgcagagatgaagatctgcaataaagagtgtcgccacgattactcgctaacggtcacgctttcaatgataacgtcttcttttggcacgtcctggtgcataccgctacgaccggttgcaacacctttgattttgtctaccacgtccatgccgtcaaccacttcagcaaacacgcagtagccccaaccttgcaggctttcgccagagaagttcaggaagtcgttatcaaccacgttgatgaagaactgtgcagttgcagagtgcggagcctgagtacgtgccattgccagcgtaccacgggtatttttcaggccgttgttggcttcgtttttgatcggttctttggtggctttttgtttcatgcccggttcaaaaccgccgccctgaatcataaagccgttgataacacggtggaaaatggtgttgttgtaaaaaccttcgcggcagtagtccaggaagtttttaactgtttcaggtgctttatcgtcaaaagttttgatgacaatatcgccgtgattggtgtggaaagtaaccatttttgcatcctgttccgtttgattggtgcttcaacccagttcgggtcatatatagggtggtgttatagcataaccgcacgatcggatcatcacgcaatgtatgctgattcgcgcgggaaatatgggtattatacgcaactcaattacccacacatgtctaaacggaatcttcgatgctaaaaatcttcaatactctgacacgccaaaaagaggaatttaagcctattcacgccggggaagtcggcatgtacgtgtgtggaatcaccgtttacgatctctgtcatatcggtcacgggcgtacctttgttgcttttgacgtggttgcgcgctatctgcgtttcctcggctataaactgaagtatgtgcgcaacattaccgatatcgacgacaaaatcatcaaacgcgccaatgaaaatggcgaaagctttgtggcgatggtggatcgcatgatcgccgaaatgcacaaagattttgatgctttgaacattctgcgcccggatatggagccgcgcgcgacgcaccatatcgcagaaattattgaactcactgaacaactgatcgccaaaggtcacgcttatgtggcggacaacggcgacgtgatgttcgacgtcccgaccgatccaacttatggcgtgctgtcgcgtcaggatctcgaccagctgcaggcaggcgcgcgcgttgacgtggtcgacgacaaacgcaacccaatggacttcgttctgtggaagatgtcgaaagagggcgaaccgagctggccgtctccgtggggcgcgggtcgtcctggctggcacattgaatgttcggcaatgaactgcaagcagctgggtaaccactttgatatccacggcggcggttcagacctgatgttcccgcaccacgaaaacgaaatcgcgcagtccacctgtgcccatgatggtcagtatgtgaactactggatgcactcggggatggtgatggttgaccgcgagaagatgtccaaatcgctgggtaacttctttaccgtgcgcgatgtgctgaaatactacgacgcggaaaccgtgcgttacttcctgatgtcgggccactatcgcagccagttgaactacagcgaagagaacctgaagcaggcgcgtgcggcgctggagcgtctctacactgcgctgcgcggcacagataaaaccgttgcgcctgccggtggcgaagcgtttgaagcgcgctttattgaagcgatggacgacgatttcaacaccccggaagcctattccgtactgtttgatatggcgcgtgaagtaaaccgtctgaaagcagaagatatggcagcggcgaatgcaatggcatctcacctgcgtaaactttccgctgtattgggcctgctggagcaagaaccggaagcgttcctgcaaagcggcgcgcaggcagacgacagcgaagtggctgagattgaagcgttaattcaacagcgtctggatgcccgtaaagcgaaagactgggcggcggcggatgcggcgcgtgatcgtcttaacgagatggggatcgtgctggaagatggcccgcaagggaccacctggcgtcgtaagtaattgcgctattgccggatgcgagttttcgcatccggttatcgtctgcgccaccacaacattcccatcagtagcatccccggcaaccacacccacatcaattcagaaataatcacctgatgcccgtacggcgtggtgtaacgagacaatgcaaacggcgcgacttttatcacctgccagggagcgaaaaagcgttcatctgaccacggccacagccagccaacgcctttaccgccagtggttaccgaatccagcaagctgtgcgatagcaacgagacggttaaaaacagccagcagcgaatcagcccagccctgaaccatcggcgtccaataaacacacataacagcgggacaacaaacgcaaacaccagcgaatgggtaaacccgcgatgaccaaaaacattgccgtaagcaacgccaaatttaaacgacaatacgtcggcgtcgggcagcatcgccaggatgattccggcaaataacagacgcggagggatgactttcgaacccaaccctaaaccaatgcataggggaacggcggcgtgcgtaataacggttggcatgatggtcgcttcggcaaaatgtcgatgctatcagcatggatgaacggggcgtagagggcaaaagtctgaaaagagaaccggcctgttgatacaggccgggaaagggatcaggcaacaacctgtacgctgtgacctgcaaaactcactgtctgaccggcgacgattttgcagcgtttgcgcgtttcaaccgcaccgtcgactttcacctggccttcggcaatcgcgattttcgcctgcgcgccgctttcgctccagccttccagtttcagcaagtcgcacagctcaacgtgcggatgtttacctaaagaaaatgtcgccatgttactcatcctgtggatcatgatattcaacgcacgcctgtagcgtgttttcaatcagcgtggcaaccgtcatcgggccaacgccgccgggaacaggcgtaatgtatgaggcgcgtttagccgcgtcttcaaacacgacgtcgcccacaactttgccattttccagacggttgatgccgacatcaatcacaattgcgccttctttgatccagtcaccgggaataaagcctggcttgccaacggcaacgatcaatagatcggcattttctacgtgatgacgcagatttttagtgaagcggtgagtcactgtagtggtgcaacctgccagcagcagttccatgctcatcgggcggccaacgatattcgatgcgccaatcaccacggcgttgaggccgaaggtatcaatgttgtaacgctcaagcagcgtgacgataccgcgcggggtgcagggacgcagacgcggcgcgcgctggcacagacgaccgacgttgtaaggatggaaaccgtccacgtctttgtccggatgaatacgttccagcactttgacgttatcaatacccgccggtaacggcagttgaaccagaatgccatcgatggtgttgtcggcattcagcgtatcgataagctccagcagctccgcttcgctggtggtttccgggaggtcataagagcgggagacgaacccgacttcttcacaagccttgcgtttgcttgcgacataaatttgcgatgcagggttactacccaccagcacaacggccagtcctggtgcccgcagtccggctgcaatacgcgcctgaactttttgagcaacttcagagcgcacctgctgcgcaatcgttttaccgtcaataatctttgctgccatcagagagaggattccatctgttacgtagatcgaaggggatgcgcctattttgtcagaagcggggcgcgctgtcaggtttcgtttcagatttatcgcgtgaagcgacctcttgcgaaggtgaggcgcaccgtcgctgagactgaaagcttcatttttcgtccatgatggcgttgtaaatctggaactgatttatttccttgtctaaggattaagataatttaagaaatacctgacaatataaaaagaattttcagcctggtaatttaccgcttcaggtctatatttgtgttgaatatattttgcgcggaagtattcatctaacggggctctctattttttagaatagagtgcatattttcaattaagacattcttagaggataaaaaggaatttactactatcagtgtcttaaataaagtaatcggttatatacggatgtggagtcgataaatgagattgaaggaatatatatgaaattaagatttatttcgtctgcgctggctgccgcactattcgccgctacgggtagttatgctgccgttgtagatggcggtacaattcactttgaaggcgaactggtgaatgctgcctgttcagtgaatactgactcggcagaccaggttgtcacactcggtcaatatcgtaccgatattttcaatgctgttggtaatacctctgcattaattccattcaccattcagttgaacgactgcgatcctgttgttgccgctaatgctgccgttgcattttctggtcaggctgatgcaatcaatgataatttattggccattgcatccagtaccaatacaacaacagcaacgggtgtcggtattgaaatacttgataatacatccgcaattctcaaacctgatgggaatagcttctcaaccaaccagaacttgatccccgggaccaacgttcttcatttttctgcacgttataaaggcaccggtacaagtgcatcagcagggcaagcaaatgctgacgcgacttttattatgagatatgaataatcaaaaccacgttgttttgaattatatatcacgtcttataacaaagtaatgtaccggttgtctgaagcggtatggtggcaatgtaaatcgaaatcatgttcactttgtatcatgccgctttattaaatgaaaagggaatgatgtgttgtaagaaaccaaagcaatcatttctttatattccttatttttgccgtcaggaatacacaaggcgtattaactatgatgactaaaataaagttattgatgctcattatattttatttaatcatttcggccagcgcccatgctgccggagggatcgcattaggtgccacgcgtattatttatcccgctgatgctaaacagactgcggtatggattagaaatagccataccaatgagcgctttctggtcaattcgtggattgaaaacagcagcggtgtaaaagaaaagtcattcatcattacaccgccactgtttgttagtgaacccaaaagcgaaaatactttgcgtattatttacaccggtccaccgctggcagcagatcgtgagtctctgttctggatgaatgttaagacgatcccttcggtagataaaaatgcattgaacggcaggaatgttttgcaactggcgattttatcgcgcatgaaattatttctccgtccaattcaattacaagaattacccgcagaagcgccggacacactcaagttttcgcgatccggtaactatatcaatgttcataatccatcacctttttatgtcaccctggttaacttacaagtgggcagccaaaagttggggaatgctatggctgcacccagagttaattcacaaattcccttaccctcaggagtgcagggaaagctgaaatttcagaccgttaatgattatggttcagtaactccggtcagagaagtgaacttaaactaaccgaatcatctgacaatatcagagctaattatgaaaatacccactactacggatattccgcagaggtatacctggtgtctggccggaatttgttattcatctcttgccattttaccctcctttttaagctatgcggaaagttatttcaacccggcatttttattagagaatggcacatccgttgctgatttatcgcgctttgagagaggtaatcatcaacctgcgggcgtgtatcgggtggatctctggcgtaatgatgagttcattggttcgcaggatatcgtatttgaatcgacaacagaaaatacaggtgataaatcaggtgggttaatgccctgttttaaccaggtacttcttgaacgaattggccttaatagcagtgcatttcccgagttagcccagcagcaaaacaataaatgcatcaatttactgaaagctgtacctgatgccacaattaactttgattttgcagcgatgcgcctgaacatcactattcctcagatagcgttgttgagtagcgctcacggttacattccgcctgaagagtgggatgaaggtattcctgctttactcctgaattataatttcaccggtaacagaggtaatggtaacgatagctatttttttagtgagctcagcgggattaatattggcccgtggcgtttacgcaacaatggttcctggaactattttcgcggaaatggatatcattcagaacagtggaataatattggcacctgggtacagcgcgccattattccgctgaaaagtgaactggtaatgggagacggcaatacaggaagtgatattttcgatggcgttggatttcgtggtgtacggctttattcttctgataatatgtatcctgatagccagcaagggtttgccccaacggtacgtgggattgcccgtacggcggcccagctaacgattcggcaaaatggttttattatctatcaaagctatgtttcccccggcgcttttgaaattacagatttgcacccgacatcttcaaatggcgatctggacgtcaccatcgacgagcgcgatggcaatcagcagaattacacaattccgtattcaacagtgccaattttacaacgcgaagggcgtttcaaatttgacctgacggcgggcgattttcgtagcggtaatagtcagcaatcatcgcctttcttttttcagggtacggcactcggcggtttaccacaggaatttactgcctacggcgggacgcaattatctgccaattacaccgcctttttattagggctggggcgcaatctcgggaactggggcgcagtgtcgctggatgtaacgcatgcgcgcagtcagttagccgacgccagtcgtcatgagggggattctattcgcttcctctatgcgaaatcgatgaacaccttcggcaccaattttcagttaatgggttaccgctattcgacacaaggtttttatacccttgatgatgttgcgtatcgtcgaatggaggggtacgaatatgattacgacggtgagcatcgcgatgaaccgataatcgtgaattaccacaatttacgctttagccgtaaagaccgtttgcagttaaatgtttcacaatcacttaatgactttggctcgctttatatttctggtacccatcaaaaatactggaatacttcggattcagatacgtggtatcaggtggggtataccagcagctgggttggcatcagttattcgctctcattttcgtggaatgaatctgtagggatccccgataacgaacgtattgtcggacttaatgtttcagtgcctttcaatgttttgaccaaacgtcgctacacccgggaaaatgcgctcgaccgcgcttatgcctcctttaacgccaaccgtaacagcaacgggcaaaatagctggctggcaggtgtaggtgggaccttactggaaggccacaacctgagttatcacgtaagccagggtgatacctcgaataatgggtacacgggcagcgccacggcaaactggcaggccgcttacggtacgctggggggcgggtataactacgaccgcgatcaacatgacgttaactggcagctgtctggcggtgtggtcgggcatgaaaatggcataacgctgagccagcctttaggggataccaatgttttgattaaagcgcctggcgcaggcggtgtacgcattgaaaatcaaactggcattttaaccgactggcgcggctatgcggtgatgctgtatgccacggtttatcggtataaccgtatcgcgcttgataccaatacgatggggaattccatcgatgttgaaaaaaatattagcagcgttgtgccgacgcaaggcgcgttggttcgtgccaattttgatacccgcataggcgtgcgggcgctcattaccgttacccagggcggaaaaccggtgccgtttggatcactggtacgggaaaacagtaccggaataaccagtatggtgggtgatgacgggcaagtttatttaagtggtgcgccattgtctggtgaattactggttcagtggggagacggcgcgaactcacgctgcattgcgcactatgtattgccgaagcaaagcttacagcaagccgtcactgttatttcggcagtttgcacacatcctggctcataaaggaaattatcaataagataatctgcagattattattggcgatggcatgtttgtgtctggcaaacatatcctgggctactgtttgtgcaaatagtactggcgtagcagaagatgaacactatgatctctcaaatatctttaatagcaccaataaccagccagggcagattgttgttttaccggaaaaatccggctgggtaggtgtctcagcaatttgtccacccggtacgctggtgaattatacataccgtagttatgtcaccaactttattgttcaggaaactatcgataattataaatatatgcaattacatgattatctattaggtgcgatgagtctggttgatagtgtgatggatattcagttccccccgcaaaattatattcggatgggaacagatcctaacgtttcgcaaaaccttccattcggggtgatggattctcgtttaatatttcgtttaaaggttattcgtccctttattaacatggtggagatccccagacaggtgatgtttaccgtgtatgtgacatcaacgccttacgatccgttggttacacctgtttataccattagttttggtggccgggttgaagtaccgcaaaactgcgaattaaatgccgggcagattgttgaatttgattttggtgatatcggcgcatcgttatttagtgcggcagggccgggtaatcgacctgctggtgtcatgccgcaaaccaagagcattgcggtcaaatgtacgaatgttgctgcgcaggcttatttaacaatgcgtctggaagccagtgccgtttctggtcaggcgatggtgtcggacaatcaggatttaggttttattgtcgccgatcagaacgatacgccgatcacgcctaacgatctcaatagcgttattcctttccgtctggatgcagctgcggcagccaatgtcacacttcgcgcctggcctatcagtattaccggtcaaaaaccgaccgaagggccgtttagcgcgctggggtatttacgcgtcgattatcaatgaggtacggagaatgagaagagtactctttagctgtttctgcgggctactgtggagttccagtggatgggcagttgaccctttaggaacgattaatatcaatttgcacggtaacgttgttgatttctcctgtaccgtaaacacagcggatattgataagacggtagatttaggcagatggcctacgacacaactactgaacgctggcgataccacggcactcgtcccttttagcctgcggctggagggatgtcctccgggttcagttgcgattttatttacgggaacgccggcatccgataccaacctgctggctctggatgatcccgcaatggcacaaaccgtcgccatcgaattacgtaatagcgatcgctcccggctcgcactgggggaggcgagcccgactgaggaagtagatgcaaatggcaatgtcacactaaacttttttgccaattatcgagcgttagccagcggtgttcggccaggtgtggcgaaagcggatgcgatatttatgatcaattataattaatattatattaattcgtataatttggcgtagtcgataagctctacaattgaatgcaaacctagcttgccataaatattagatttatgcgcactaactgttttattgctaagtaataacttatcggcaatttctttattagataatccgctaaccagataacgtaatatggtcacttcacgattagatagcacagtgaccgttgaactattcgtactacatttattgctttttatatagttaagcgtttcgctgggaaaaaacgtgtatccggagaggatcatctgaacggcatgaaaaatatcattctgatcattgcatttactgacaaaaccgttagcaccagcttgtatcgctctgccagcataaaagcattctgatttcgatgataaaaataacactttcactgtgctctggatttgtttgatccttttcaggaaggtaaaaccgtctgttccgggcaagtctatatccataatgattaaatcaacaggacgggttcggagataatcgatggttatgcgataatcatccgttttcaggacaatctgcaattcactgtttttttgcaacagaacttcaatagacattctgatgataggatgagtatccataatgatcaccgacgttggtttcatagttaccagtctcataggagcggacaattttccgttaggtcgggaaattgtactttgatacatgaaaatacgggttttcttgattcagacgcgcagcggtgtgcgtttgtttgccgctatagcgaaataaatcagaaaatcagacgcggtcgttcacttgttcagcaaccagatcaaaagccattgactcagcaagggttgaccgtataattcacgcgattacaccgcattgcggtatcaacgcgcccttagctcagttggatagagcaacgaccttctaagtcgtgggccgcaggttcgaatcctgcagggcgcgccattacaattcaatcagttacgccttctttatatcctccataatttcagagtgggacatatttgggacattatcaccaaaaatgtcgtctattttcctcgcatgctctgtcaaatgattaggcgcaaggtgagcatacctacgaaccatttctatggactcccatccgcccatttcctgaagcactgataatgggacgcctgactgaatcagccagcttgcccaggtgtgtctgaggtcatggaaacggaaatcttcaattcctgcacgacgacaagctgatagccatgatgtcttgctgtcgatgcgcatcttcctgaccgcaggcgttgatgttccatctgctcgcttagccgccttggtatgtacaaacacccatttgtgatgcttgcctatttgatcacgcaacactttacaggcggtatcgttcagcgccacaccaatggcgcggtttgatttgctctcttctggattcacccaggcaactcgtcgctgcatgtcgatttgttgccattccagatttatgatgttcgactttctcagaccagttgccagcgcaaacttgacgacagatttcagtggttcggggcactcatcaataaggcgttttgcttcctccttttccagccatctgactcgcttgtttctgaccgctggtatcttgatgacaggcgctttttccagccacttccagtcgcgttctgcagcacggagaatggcctttatcatggcaagatgctttgcctttgtctgagttgatactggctttggttcataaacaggcagttctttacctttcctgatggcggcctgaactttctgtttccatatttctttcgtctttctgttatgcattctgcttacagcagagtaaatctttgcctccgagatatctttaagccttataccctcaaaatgttcaagccagaactcaatccggcttttatctgaatcgagagattttttatcagctttttcctcaagccatcttaggcaggcctcttcaaaagtgacatcaggtaaatcccctagcttttctactcgccagagttctgcttttcgcttgtcgtgcaactcctgagcttgccgtttgtcctttgtgccaagagattccttaattcgtttcccgcccgggagcgaatacgaggcataccatatttcatttctgcggaagagtgacattttctttcctctgttatgccatcacccgcgctcacctggacagtatgcagcggagactgaagcgccgcaatgcaggcttgccgtgttgtgaggtacccggatattatcgtgaggatgcgtcatcgccattgctccccaaatacaaaaccaatttcagccagtgcctcgtccattttttcgatgaactccggcaccatctcgtcaaaactcgccatgtacttttcattccgctcaatcacgacataatgcaggccttcacgcttcatgcgcgggtcatagttggcaaagtaccaggcatcttttcgcgtcacccacatgctgtactgcacctgggccatgtaagccgattttattgcctcgaaaccaccgagccggaatttcatgaaatcccgggaggtacgagtattgccggaagcgtggcctgtatccggatgcagagtcttatccgtggaaatcgaacgcgcattactggttggttaccaacttgtaccagaacatgcgggccaatgcgctggctgacgcggaattacggcgcaaggctgccgatgaactgacctgtatgacagcgcgaattaaccgtggtgagacgatacctgaaccagtaaaacaacttcctgttatgggcggtagacctctaaatcgtgcacaggctctggcgaagatcgcagaaattaaagctaagttcggactgaaaggagcaagtgtatgacgggcaaagaggcaattattcattacctggggacgcataagagcttctgtgcacaggacgttgccgcggtaacaggcgcaaccgtaatctgatcttacccagcaatagtggacacgcggctaagtgagtaaactctcagtcagaggtgactcacatgacaaaaacagtatcaaccagtaaaaaaccccgtaaacagcattcgcctgaatttcgcagtgaagccctgaagcttgctgaacgcatcggtgttactgccgcagcccgtgaactcagcctgtatgaatcacaactctacaactggcgcagtaaacagcaaaatcagcagacgtcttctgaacgtgaactggagatgtctaccgagattgcacgtctcaaacgccagctggcagaacgggatgaagagctggctatcctccaaaaggccgcgacatacttcgcgaagcgcctgaaatgaagtatgtctttattgaaaaacatcaggctgagttcagcatcaaagcaatgtgccgcgtgctccgggtggcccgcagcggctggtatacgtggtgtcagcggcggacaaggataagcacgcgtcagcagttccgccaacactgcgacagcgttgtcctcgcggcttttacccggtcaaaacagcgttacggtgccccacgcctgacggatgaactgcgtgctcagggttacccctttaacgtaaaaaccgtggcggcaagcctgcgccgtcagggactgagggcaaaggcctcccggaagttcagcccggtcagctaccgcgcacacggcctgcctgtgtcagaaaatctgttggagcaggatttttacgccagtggcccgaaccagaagtgggcaggagacatcacgtacttacgtacagatgaaggctggctgtatctggcagtggtcattgacctgtggtcacgtgccgttattggctggtcaatgtcgccacgcatgacggcgcaactggcctgcgatgccctgcagatggcgctgtggcggcgtaagaggccccggaacgttatcgttcacacggaccgtggaggccagtactgttcagcagattatcaggcgcaactgaagcggcataatctgcgtggaagtatgagcgcaaaaggttgctgctacgataatgcctgcgtggaaagcttctttcattcgctgaaagtggaatgtatccatggagaacactttatcagccgggaaataatgcgggcaacggtgtttaattatatcgaatgtgattacaatcggtggcggcggcacagttggtgtggcggcctcagtccggaacaatttgaaaacaagaacctcgcttaggcctgtgtccatattacgtgggtaggatcaaccagcataaatcaggctgcggctaaaatggcgcgggcaggaatcctggtcgttgatggtaaggtctggcgaacggtgtattaccggttcgctaccagagaagaatgggaaggaaaggtgagcacgaatctgatttttaaggagtgtcgccagagtgccgcgatgaaacgggtattgagggtatataaaagaacatcaatgggaacacaatgatgaaacaggtgagttgagttcaaactgtagtacaattctctccagtttgaacaggaaagaatatgctatgaacccttatatttatcttggtggtgcaatacttgcagaggtcattggtacaaccttaatgaagttttcagaaggttttacacggttatggccatctgttggtacaattatttgttattgtgcatcattctggttattagctcagacgctggcttatattcctacagggattgcttatgctatctggtcaggagtcggtattgtcctgattagcttactgtcatggggatttttcggccaacggctggacctgccagccattataggcatgatgttgatttgtgccggtgtgttgattattaatttattgtcacgaagcacaccacattaaaataatttgtttctaaacgactaaaatatggaggctcttatatttatatgagcctcgttttatgctttttgttaatgtctttattttttatgtattcttttgtgctttcaagattatggcgtaagaaaattgcaatacgattattgttgtatattcaagataatgtgaccttaattgtctttttaaataaaaaataaacaaaaattatatcccaccactaaggtttataaaagcatacgttagcaggtgtcaccatgaaaaaagccatagcatatatgcgattttcatcaccaggtcagatgtctggcgactcattaaaccgacagagaagacttattgctgaatggttaaaggtaaatagtgattattatcttgataccataacatatgaagatttaggattaagtgcattcaaaggaaagcatgcacaatcaggagctttttcggaatttttagatgctatagagcatggttatatattgccaggaactacattgttagttgaaagtctggacagactttcaagagaaaaagtcggtgaagcgattgaacgtctgaaattgattttgaatcacggtattgatgttataactctttgcgacaatacagtctataatattgactctttgaatgagccatattcattaataaaagccatacttatagcacaaagggcaaatgaagaaagcgagataaagtcaagtcgggttaaattatcatggaagaaaaaacggcaggatgcactggaatcaggtacgattatgacggcgtcttgtccgagatggctctccttagatgacaaaagaacggcttttgttccagaccccgacagggtgaaaactattgagctaatttttaaactcaggatggaaaggcgctcattgaatgcaatagccaagtatttaaatgatcatgctgtaaagaatttctcaggaaaagaaagtgcatggggaccttctgtaattgaaaaattattagcgaataaagctctgataggtatttgcgtaccttcatatcgtgcaagagggaaagggataagtgaaatcgctggctattatcccagagtcatatcagatgatttgttttacgctgtacaggaaattcggttggcaccttttggtattagcaatagtagcaagaatcctatgctaataaatctacttcgaacagttatgaagtgtgaggcttgtggtaataccatgattgttcatgcggtatctggaagtttgcatggctattatgtttgtccgatgagaagattacatcgatgtgacaggccatcaataaaaagagatttggttgattataatatcattaatgaattgctttttaattgtagcaaaattcaaccagttgaaaacaagaaagatgctaatgaaactttagagttaaaaattattgagcttcagatgaaaattaataatttaatcgttgcattgtctgtcgcgcctgaagttaccgctatagcagagaaaataagactattagataaggaattacgaagggcttcggtatcattgaaaactttgaagagtaaaggtgtaaattcattcagtgatttttatgctattgacttaaccagtaaaaatggacgagagttatgccgtacacttgcctataaaacattcgaaaaaatcataattaatacggataataaaacctgtgatatctattttatgaatggcattgtttttaaacactatcctttaatgaaagtaatatccgcccagcaggcgataagtgctctcaaatatatggttgatggtgagatttatttctaaataatgatctcggattttaagttatgctatggtgataaagtgcaagacagaattaattatctttgacgaaacttaatgggtaattactttgtttgctcccacaagcgagttttgtacggctgtattggggtagtaaatgagctatacaatcttaatcatttgttaggtgagaactcttggtcgcagattcaaatactgaaaatacgtgacaaattattatgagcaaaatggtgtatgtcacgtattttgaatggtaggttaaaaaataacaccgactttcgtaggtgttactaataataaagcagagtttttagatagtatcaatgtgctttgtgtatattgtggcaaataattgggttgggggtacaattgtgattgcttttgcatgaacattgcgcctttatgcataatgagataaaggaatatcaaataaaataacgataggtcataacaaagaggtttttatgaaaacacttatcgtttcaactgtattggcattcataacattttctgcgcaggctgcagcatttcaggtcactagtaatgaaataaaaacaggagagcaacttacaacgtctcatgtcttttctggatttgggtgtgaaggtggtaatacatcgccctcattaacctggtctggtgttcctgaaggtaccaaaagctttgccgtaactgtatatgatccagatgcacctacaggcagtggttggtggcattggactgttgttaatattccagcaacagtaacatatttgcccgttgatgcagggagacgtgatggaacaaaactgccgactggtgctgttcaaggccgaaatgattttggctatgctgggtttggtggcgcatgtcctcctaaaggagataaaccacatcattaccagtttaaagtatgggctctaaaaactgaaaagattcctgtagattctaactccagcggagcgttagttggttatatgcttaatgctaataaaatcgcaaccgctgagataacaccagtttatgagataaagtagggtgagagtatgctggcaagaggtaagactaacttaaagatcgaagaaatacggatgcataaacatcatgagattcatagggttaagcctcttatgccagctttgtgtcgtatccgtcagggaaagaaagttatcaattgggagacgcatactttaactgttgataataatcaaataatattatttccttgtggttatgaattttatattgagaattatcctgaagcagggctttatcttgcagaaatgctttacttacccattgatttaattgagagtttccaaaaactttatacggtaactgatcaaatacgtaacaaaacaagtttctttttacctcagaatcctgagttaatatattgttgggagcaactaaaaacatctgtttcccgaggcttctcaactaaaattcaggagcacttagcaatgggcgttctactttcgttaggagtgaatcatgttaatcatttacttttatcatatagtaaacaatcattgataagtcgttgttataacctgctgctatccgaacccggcacaaaatggacagcaaacaaggttgctcgatatctctacatttctgtttctacattacatcgccgtctagcaagcgagggggtaagtttccaaagtatactggacgatgtgaggttaaataatgcgttgtctgctatacaaacgacggtaaaacctataagcgagattgccagagaaaatggttataagtgtccttctcgttttactgaaagatttcataatcgttttaatataacaccaagagagataagaaaagcttccagagagtaaaagtgttttaagaaggagcaattctatcgattttgattttgggaaatcaacacggcataattatgtcaccggagcctgaacaactccggtgacttctgcgctaaacggggacgtttatgcgcacatacaatccaaactctcttctcccttcacagatgcagaaatgcacctgcaattctttgcatctagcgtttgacctctgcggaggggaagcgtgaacctctcacaagacggcatcaaattacatcgcggcaacttcaccgctatcggtcggcagatccagccttatctggaggagggcaaatgctttcgcatggtgcttaaaccgtggcgtgagaaacgcagtctttcccagaatgcactcagccacatgtggtacagcgaaatcagtgaatacctcatcagcaggggtaaaacgttcgccactccagcttgggtaaaagatgctctcaaacacacatatctcggttatgaaaccaaagacctggttgatgtcgtaaccggtgatatcaccactatccagtcgttacgccatacctccgatcttgataccggagagatgtatgtcttcctgtgtaaggttgaagcctgggcgatgaatattggttgccacctgactattccacagagctgcgagttccagctgctgcgcgacaagcaggaggcgtaatggctacaccgcttattcgtgtcatgaacggacacatctacagagtaccaaatcgtcgtaagcgtaaacctgagctgaagccatccgaaataccaacactgctcggatataccgccagcttggttgataaaaaatggttgcgactggcagcaaggaggagtcatggctgatttgagaaaagcagcgcgtggtcgggaatgccaggtaagaatccctggcgtatgtaatggcaaccctgaaacgtctgtactggcacatatccggctgactggattgtgcggcaccggtacgaaaccgccagacctgattgccaccattgcatgttctgcctgccacgacgaaatcgaccgccgcacgcattttgttgacgctggatatgcaaaagaatgcgcgctggaaggtatggcgagaacacaggttatctggctgaaagagggggttattaaggcgtgaatacctacagcatcacattaccctggcctccgagcaataatcgctattaccgccataatcgcgggcgcacgcacgtcagcgcagaggggcaggcataccgcgataacgtcgcccgaatcattaaaaacgcaatgctggatatcggcctggctatgcctgtgaaaatccgcattgagtgccacatgccggatcgccgtcgccgtgacctggataatctgcaaaaagccgcttttgacgcactcactaaagcaggtttctggctggatgatgctcaggtcgttgattaccgcgttgtgaagatgcctgttaccaaaggtgggaggctggaactgaccatcaccgaaatggggaatgaatgatgtttgagtttaatatggcagaacttcttcgccaccgctgggggcgtctgcgcttatatcgtttccccggttctgttttgaccgattaccgaatactgaagaattacgccaaaaccctgacaggagcaggagtatgaagtcagagataacaatcaactaatactgttttgttgatttttgcttgtaattggcgttctggtctgatttttgtggagtaagttgatgcgtgatattcagatggttcttgagcgttggggagcgtgggcggctaataatcatgaagatgtgacctggtcgtccattgccgccggttttaagggattaattacttcaaaagtaaaatctcgcccgcaatgttgtgacgatgacgcgatgatcatttgcgggtgcatggcccgtctgaaaaagaacaacagcgatttgcacgatttattagtagattattatgtagtcggtatgacattcatgtcactggcaggtaagcattgctgctctgatggttatatcgggaaaaggttacagaaggctgagggcataattgaagggatgttaatggcattagatatccggttagagatggatatcgttgttaataactctaattaatatgccaattgtttactaaaaattattaaaaatggggcgttgagacgcccccaaaaataaagggtaatatataacagaaggtttatatagttagaagcaaggttgtgcttctaaaggaagtggcttgagggagccacttatatgttggggaggcaacgcctcccgcaacatatctttttcgtaatcagattagaactggtaaaccagacctacagcaacgatgtcatcagtgcttacaccgagtgctttagggaaggtgcgaataagcggggaaattcttctcggctgactcagtcatttcatttcttcatgtttgagccgattttttctcccgtaaatgccttgaatcagcctatttagaccgtttcttcgccatttaaggcgttatccccagtttttagtgagatctctcccactgacgtatcatttggtccgcccgaaacaggttggccagcgtgaataacatcgccagttggttatcgtttttcagcaaccccttgtatctggctttcacgaagccgaactgtcgcttgatgatgcgaaatgggtgctccaccctggcccggatgctggctttcatgtattcgatgttgatggccgttttgttcttgcgtggatgctgtttcaaggttcttaccttgccggggcgctcggcgatcagccagtccacatccacctcggccagctcctcgcgctgtggcgccccttggtagccggcatcggctgagacaaattgctcctctccatgcagcagattacccagctgattgaggtcatgctcgttggccgcggtggtgaccaggctgtgggtcaggccactcttggcatcgacaccaatgtgggccttcatgccaaagtgccactgattgcctttcttggtctgatgcatctccggatcgcgttgctgctctttgttcttggtcgagctgggtgcctcaatgatggtggcatcgaccaaggtgccttgagtcatcatgacgcctgcttcggccagccagcgattgatggtcttgaacaattggcgggccagttgatgctgctccagcaggtggcggaaattcatgatggtggtgcggtccggcaaggcgctatccagggataaccgggcaaacagacgcatggaggcgatttcgtacagagcatcttccatcgcgccatcgctcaggttgtaccaatgctgcatgcagtgaatgcgtagcatggtttccagcggataaggtcgccggccattaccagccttggggtaaaacggctcgatgacttccaccatgttttgccatggcagaatctgctccatgcgggacaagaaaatctcttttctggtctgacggcgcttactgctgaattcactgtcggcgaaggtaagttgatgactcatgatgaaccctgttctatggctccagatgacaaacatgatctcatatcagggacttgttcgcaccttccttagtgaagtcatttttgtcaagcaggttgattttgtaatcaacgaaagtagacatatttttgttgaagtaataggttgcacctacatcaacatatttgactaagtcctgatcgccccatactccaagatccttacctttagattgcaggtaagcaacggacggacgcagaccgaaatcgaactgatattgtgcaacagcttcgaagttttgggctttattagcaacgaagtgatcagcaaatacagtcatattctgggtttcagaataggtagtggccaggtaaatgttgttagcgtcatatttcagacctgcggcccaaacttctgcatttttaccggaagcaaatacttcaggaagaactttccctgcattaacttgagtgtcggtacgatcagatttcgcataagttgcaccgataccgaatccttcgtattcataggtagcagagaaaccgaagccatcaccgttaccttcagtgtagttatcgaaatcgctacgatcgtttttgccttggtactgagcagcaaagttcagaccatcaaccagaccaaagaagtcgttgttacgataggttgcaacaccagttgcacgttgagtcatgaacacgtcggtttgagtccaagtgtcaccaccgaattctggcaggacgtcagtccacgcaccgatgtcgtatgctacaccgtagttacggccgtaatcgatggagccgtagtcaccgaatttcaggccagcgaaggcaagacgggttttatctttggaggaaccttgagattcagcgcggttgcctttgaattcatattcccactgaccgaaaccagtcagttgatcgttgatttgggtttcacctttgaagccaagacgggcataagtagtatcaccatcatctgcatcattagaggagaagtagtgcttagcattaactttcccgtacagatccagcttgttactgtctttattataaatttcagctgcctgagcagacatcgccattagtactgatgcagctacagcagaaattgccactgttaattttttcatcgtgagccctttttttgaactattattaaaaaatgatgtcactgcgcgataaatattcatctaatcaatgtgattatttcaagatgtaagttttggtttctcgtttgatttgtgaagtagatctctatttttatctgaacttttttctatcgaatcctattcatggctcttggctgaataaaaataaatctattagccaatttatattaacggctgttatttataagtgctctataatttgaaggttcaatttaaaccggctaaaaataacactggaaattattttttggttatttgttgagatttgcttatgtatttgtagtggtgttttcaatactcggtagcattctctcaaatatcatttagtggtttacgtacgtaaaaaattggttatgctgttaagagtggttacttcgtcacacagcttaaacccgccgtcgagcgggtttttccattttttgagtctcgatattagctgataacccaatacctgagttattcactgactccgagtctgttacgtttcgtagtattccctcaatttacacccgctttgtctgcgaggtggggttatgaaatccatggataagttaacaacgggtgtcgcctatggcacctcagcaggtagtgccgggtactggtttttacagctgctagataaagtcactccctcacagtgggcagcaataggtgtgctgggtagcctggtatttggcctgctgacgtacctgacaaacctttatttcaagattaaagaagataagcgcaaggctgcgagaggtgaataatgcctccatcattacgaaaagccgttgctgctgctattggtggcggagcaattgctatagcatcagtgttaatcactggcccaagtggtaacgatggtctggaaggtgtcagctacataccatacaaagatattgttggtgtatggactgtatgtcacggacacaccggaaaagacatcatgctcggtaaaacgtataccaaagcagaatgcaaagcactcttgaataaagaccttgccactgtcgccagacaaattaacccgtatatcaaagtcgatataccggaaacaacgcgcggcgctctttactcattcgtttacaacgtgggtgctggcaattttagaacatcgacgcttcttcgcaaaataaaccagggcgatatcaaaggcgcatgtgatcagctgcgtcgctggacatacgctggcggtaagcaatggaaaggcctgatgactcgtcgtgagattgagcgtgaagtctgtttgtgggggcaacagtgagcagagtaaccgcgattatatccgctctgattatctgcatcatcgtcagcctgtcatgggcggtcaatcattaccgtgataacgcaatcgcctacaaagtccagcgcgacaaaaatgccagagaactgaagctagcgaacgcggcaattactgacatgcagatgcgtcagcgtgatgttgctgcgctcgatgcaaaatacacgaaggagttagctgatgcgaaagctgaaaatgatgctctgcgtgatgatgttgccgctggtcgtcgtcggttgcacatcaaagcagtctgtcagtcagtgcgtgaagccaccacggcctccggcgtggataatgcagcctccccccgactggcagacaccgctgaacgggattatttcaccctcagagagaggctgatcactatgcaaaaacaactggaaggaacccagaagtatattaatgagcagtgcagatagagctgaccatatcgatgggcaactcatgcaattattttgagcaatacacacgcgcttccagcggagtataaatgcctaaagtaataaaaccgagcaatccatttacgaatgtttgctgggtttctgttttaacaacattttctgcgccgccacaaattttagctgcatcgacagttttcttctgcccaattccagaaacgaagaaatgatgggtgatggtttcctttggtgctactgctgtctgtttgttttgaacagtaaatgtctgttgagcacatcctgtaataagcagggccagcgcagtagcgagtagcatttttttcatggtgttattcccgatgctttttgaagttcgcagaatcgtatgtgtagaaaattaaacaaaccctaaacaatgagttgaaatttcatattgttaatatttattaatgtatgccaggtgcgatgaatcgtcattgtattcccggattaactatgtccacagccctgacggggaacttctctgcgggagtgtccgggaataattaaaaacgatgcacacagggtttagcgcgtacatgtattgtattatgccaacaccccggtgctgacacggaagaaaccggacgttatgatttagcgtggaaagatttgtgtagtgttctgaatgctctcagtaaatagtaatgaattatcaaaggtatagtaatatcttttatgttcgtggatatttgtaatccatcggaaaactcctgctttagcaagattttccctgtattgctgaaatgtgatttctcttgatttcaacctatcataggacgtttctataagatgcgtatttcttgagaatttaacatttacaacctttttaagtccttttattaacacggtgttatcgttttctaacacaatgtgaatattatctgtggctagatagtaaatataatgtgagacattgtgacgttttagttcagaataaaacaattcacagtttaaatcttttcgcacttgatcgaatatttctttaaaaatggcaacctgagccattggtaaaaccttccatgtgatacgagggcgcgtagtttgcattatcgtttttatcgcttcaatctggtctgacctctttgtgttttgttgatgatttatgtcaaatattaggaatgttttcaattaatagtattggttgcgtaacaaagtgcggtcctgctggcattctggagggaaatacaaccgacagatgtatgtaaggccaacgtgctcaaaccttcatacagaaagatttgaagtaatattttaaccgctagatgaagagcaagcgcatggagcgacaaaatgaataaagaacaatctgctgatgatccctccgtggatctgattcgtgtaaaaaatatgcttaatagcaccatttctatgagttaccctgatgttgtaattgcatgtatagaacataaggtgtctctggaagcattcagggcaattgaggcagcgttggtgaagcacgataataatatgaaggattattccctggtggttgactgatcaccataactgctaatcattcaaactacttaacctgtgacagagccaacacgcagtctgtcactgtcaggaaagtggtaaaactgcaactcaattactgcaatgccctcgtaattaagtgaatttacaatatcgtcctgttcggagggaagaacgcgggatgttcattcttcatcacttttaattgatgtatatgctctcttttctgacgttagcctccgacggcaggcttcaatgacccaggctgagaaattcccggaccctttttgctcaagagcgatgttaatttgttcaatcatttggttaggaaagcggatgttgcgggttgttgttctgcgggttctgttcttagttgacatgaggttgccccgtattcagtgtcgctgatttgtattgtctgaagttgtttttacgttaagttgatgcagatcaattaatacgatacctgcgtcataattgattatttgacgtggtttgatggcgtagatgcacgttgtgacatgtagatgataattattatcattttgtgggtcctttccggcgatccgacaggttacggggcggcgacctcgcgggttttcgctatttatgaaaattttccggtttaaggtgtttccgttcttcttcgtcgtaacttaatgtatttatttaaaataccccctgaaaagaaaggaaacgacaggtgctgaaagcgagctttttggcctctgtcgtttcctttctctgtttttgtccgtggaatgtgcaatggaagtcaacaaaaagcagctggctgacattttcggtgcgagtatccgtaccattcagaactggcaggaacagggaatgcccgttctgcgaggcggtggcaagggtaatgaggtgctttatgactctgccgccgtcataaaatggtatgccgaaagggatgctgaaattgagaacgaaaagctgcgccgggaggttgaagaactgctgcaggccagcgagacagatctccagccagggactattgagtacgaacgccatcgacttacgcgtgcgcaggccgatgcacaggagctgaaaaatgccagagactccgctgaagtggtggaaaccgcattctgtactttcgtgctgtcgcggatcgcaggtgaaattgccagtattctcgacgggatccccctgtcggtgcagcggcgttttccggaactggaaaaccgacatgttgatttcctgaaacgggatatcatcaaagccatgaacaaagcagccgcgctggatgaactgataccggggttgctgagtgaatatatcgaacagtcaggttaacaggctgcggcattttgtccgcgccgggcttcgctcactgttcaggccggagccacagaccgccgttgaatgggcggatgctaattactatctcccgaaagaatccgcataccaggaagggcgctgggaaacactgccctttcagcgggccatcatgaatgcgatgggcagcgactacatccgtgaggtgaatgtggtgaagtctgcccgtgtcggttattccaaaatgctgctgggtgtttatgcctactttatagagcataagcagcgcaacacccttattccagctggcttcgtggctgttttcaacagtgatgagtcatcgtggcatctcgttgaagatcatcggggtaaaacggtttatgacgtagcgtcaggggacgcgttatttatttctgaactcggtccgttaccggaaaatgttacctggttatcgccggaaggggagtttcagaagtggaacggtacagcctgggtgaaagatgcagaagcagaaaaactgttccggattcgggaggcggaagaaacaaaaaacagcctgatgcaggtagccagtgagcatattgcgccacttcaggatgctgtagatctggaaatcgcaacggaggaagaaacctcattgctggaagcctggaaaaaatatcgggtgttgctgaaccgtgttgatacatcaactgcacctgatattgagtggcctacgaaccctgtcagggagtaatcattgggattatgccgcagcacgtcttaagcaagaacatgctgcggttggatgctatttttttcctgaagcggaaaacattactacagtaccttgaaccttggttttaacattctcgaaatgctctgagagtatatgtgttaagccttcttcggaatcttttgtgtttgaaaagatgcctttctgattgtaaatgcgcatcagtttttgaccgaagctattgtgcacaactccatcgccaagaattgtggctccgtatagagttccatcgtcagttaaggcctgcgccgcattgcgtattacacagctttttgtagatatatttccaggcaggcagtgaagaaggtaagacatggaaatggaatcaaattgaccatgtaacgccgcgggataaggttcaaaaacatcatggctaattttatgtttaatttttgattccccagcccttgtagatgccgcgttcaggctagcttcgttcaaatccattaaagatatcagactactctcaggtacgtgagtaaggtaaaacccagttccaacaccaatatccagatggttgttacctaaatgttccagaaagtgtggaagaaggtgttcctttgtaggacatccccatgcaagccgatttgatactcccaaaacccaccagtcataaagctttagggtaagtggtgtgtaaattctagccccatcatctgtgtttttttattaatttcaccatgttatagttttatttgtgaattaaatcaattatggcaatgaattacaaggggttaaatgctgccgcagcatagcgatattgaaatagcctggtatgcttcaatacagcaggagccgaatggctggaagaccgtcaccacacagttctacatccaggaattcagtgagtatattgcgccactgcaggatgctgtagatctggaaatcgcaacggaggaagaaagatcgttgctggaagcctgaaaaaagtatcgggtgctgctaaaccgtgtggacacttccgtagcaccagatatcgagtggcttattcaaccataataaacagtatgtatatcataggttattaattgtgagttttttcggtgtgttatttgtttgtttgatgttatgcttttgcgccccaaaaggttgtttagatgtattttatcaattgattttcaatatcgtttaataaagaaaaattaagcaagctggatgttggttttttgttaattgaatggttctaataatgtttttttactgttgttgaatgtgacttgataagaaatgcaagtaaaaatgatactctttttattttaaattcaaacggttgacatatatatagcaagaggtttcaggtgcgttgtagtgagtttatgttaataaaaagcatagtaagcgttgaaaaatgtaactttgaaataagttagaataaaaaacaacatacatataataatttaatcttaaatgaaatttattaaaatttgcaaactataattttgtgtataaaaatataaatgcacatcatcctgattatgattgtgtatttaattggttgttatttgactactatcaacttgttttaattttatgataggtgcaagatggattatgtttgctccgtagttttcatctgtcaatcatttgatttaattataaacaggagagttatctcgttcaaaaaaaattcattgtttattgtaagcgacaaaattagaagggagttaccagtatgcccctctaaactaagaattgttgatatagataagaaaacatgtttatccttttttatcgacgtgaataatgagctgcctggcaaatttactcttgataagaatggctatattgctgaagaggaacctccattatcgcttgttttttctctgtttgaagggattaaaatagcagactcacactccctttggttaaaagaaagactatgtatatccttacttgccatgttcaaaaaacgcgaaagtgtaaattcatttatactaacaaatataaatacatttacctgtaaaattactggaataatcagttttaatattgagcggcaatggcatttaaaagatattgcggaattgatttatacgagtgaaagtttaataaaaaaaagattaagggatgaaggaacgtcatttactgaaatattgagagatactaggatgaggtatgcaaaaaaactcataacttcaaactcttattctatcaatgtcgtagcccagaaatgtggctataacagtacttcatatttcatatgtgcatttaaagattattatggtgtcacgccatctcattattttgagaaaataatcggcgtcacagatggaataaacaaaacaattgactgataatgtttattacaagttgtctacatgttaattataatattatacagcgttttttttgatgtgatattctggaaccattaatttgtaattgggttgctgtcgcctattttatacatactataattgatggttttctatgtgatttagttaataaccttctgggtttattttaagggttaattgttacattgaaatggctagttattccccggggcgattttcacctcggggaaattttagttggcgttcttaaaatgtgtacttaagaccagcagtagtgatgaagttatagttttctatacctgctccatttttgctgtagtctgaagtgttattattgtgatcataaagtgaagtattaccttttttattcgtaacccgattccatgcgccttcaacataaacttttgcgttaggtgtgacgtaataacctgcattgactgcaacagaatagtaattttggtctttgaccttactgcgataagtgattctttttcccgggtcatagtgttcatcgttatcagatgattccacccagccgctgtatttaaatgtgccaccgagttcaaaatcttcataacgataacttccagtcaagccaatgtagggcattttaaaacgttgtttgtagccgattgctctttctccattcgggaaggagccgatatcatctctgaatccctcctcagaactgtagatataggaaccacctctggctgtaaagctataacggctttcctgatatccggccatgagtcccaggcggtaattgggttcgttgaggagccagcctttgatattcagatcaaattcgttggcataattgagttgtgtatcagggtgtctactttcatccgtccaggttccggggttactggaatccatccagtcctgatcgaccatattgccacctcggctgccgagagttgtccagccagcagccccgatagatatctggggcatcaaatcccaattaattgcacctttaataattgcagcgttattgaatttccagtcgagttgactgacttttcggcctccttcttcggctagataaacacgctcttttgtttttccgctcagagttccaagactaatgtccgcatttatgttgtcaggagtaaacgataaagtctcggtagaagcaaaagagctgatcgcaataggggttgtcaggactattcccagaagtttcgcccgcataaaagttctccattcaatcgttttaatgattgaatatgtattttttatatctaacttaatgagtcaattacatattgctccactgtttatattttgtttagtattgaatgattatcacaatgcgctatctgtttttggtttaattatctgttattgtttcatatttcggttttactgtgtggtttttttatgcttttgtggtgcttttatctatttaagtgccatgcctttagaggcatataagcgaaaatagcatgaggtttatcctcaattactatgttttttagtacaaaaaagagggacaaaactgagacacataaggcctcgcaatggcttgcaaggctttacatgttttgaggtagtgggacgtgtgagcgcagagatggcgcggtaagttgttgacttaaaatgtcgttctaggaacttctaagtcgtgggccgcaggttcgaatcctgcagggcgcgccatttcttcctcatttatgcccgtcttatccgtttccgctttgcccttcaccacatcactttttgtcgctgtttggcgagataattcaacggtgtcaggccgtaaaacgccttaaaaacagagataaagtacgacgtgctgctatagccacataattgcgccacctgagtgatatttttgttatccatcaataacatctgtacggcgtaacgcatacgacactctgtgacaatctggctatagctggtattttcgttttttaatttctttttgagcaggctggggcttaaacatagcgaactggcgacaattcgcagattccagtaatgctgaatatcgctttgaataatgcggcagacgctgtcgcggacgctgctgcgtaagatatacatcagtagggcaataaaccgcgattgctcaagaaagttagacaatacggtaaaaagcaatgcgcgcgtcaactccgcttcgcagggtctgctgggttgctgcttgctgtggttggcggctagccggaacacttccggtgtacggctatgacaagcgataaccggggttgccagccgcgaccagggctttacacaggttaagttcttatttaaaaacaacagataatcgttgatgatgttacggttgatgtgggtgattaatacgtgatttaacgttgagagttcaatgacgttattgttgcacgcgaaggcggccaggtagtttttcggaagggtaaacgtagcatggttattgacgcttacctctacctctttttcggtcaggatcaccacgcaaggttcactgctgctcaattgcatttcgcactcctcagatatcagaaactccgctcaaaggatctatgcttcctgcatgagtgatcggcccgttcgccgataacgatcttctttctttagcacgctttttagcaattaatcttgatggaattctgatgagagcgaaagaggtaagccaggtcgtacccgacttacctggaggagatttaatactcgagaatgccgtgcgcgacgggcaaatagcgcagagagaaatagagagtgtctttaccgcaagaggaacgtttcgctaacagcgaggcaatttctgcgtccggtttcggtttcgctgtaaaggttttgcctttgccggcgacaaaaagttcataaacaacgccgctggcaggggcgggactttggcaatcggcgctggcctgtaaataacgttcacgctgttcagcggtcagtttatccacgccgctgccatcctgtacccagacattaacgccggttgctttaacgtgttccagcagttggcgatagccatcgggcgacatgtttccggcgaaaaaactactgatataaaccggttttgctgaaacatcgctaatcagccgctgcgcgttgtttaaccatgttagcaaaggctgacgggcggcttcgctgcgccagttcaggtcgtcaatttccgcgctgatgtaccagccatccggcgttatgccaggcgcggcgctccataatctggcttgctggagatcggcagccagcaggcgattaagatagctttccagcgctgcggacgactgtttctggtgcataaaaaattccggatcggcgttcagcccgacaataagcttcagaccagcctgttgcgcagctgcggcccgcttaaacaataacgtgcgctgttctggctgggtaaatgcatcgccgtaacgggtccattgcaaaacaagggtatcgaagccttgcaaacgtaactgactcatcagcccctgccactgggtatcggtaacctgactatctcggttttgtggttgccagataatacctttcatcgcaaaggaaaaagggctgaccaaaagcagtgtcagcaatacgaaaatgaacttacgcatttaccagtgcactccaatggtgagaaacgcgttgttgcgctctccgttacgttgattaatcgccttaaaggtatgttgatactcgacgccgagactgactttgtgcggccaggcgtcgtagtgcgtctcgccggtccagatattccagcggaccccgactccgccaagctgcgcgccctgagtgcctttatcacgatagccgttgtcctgaacgtgagcgtaaggctcaatagtctgtccgttagctaccttctgatgccagctgacgcgataatctgccgtccacgcctgaatatcctggcggatatattgcgccgcatcgaggtacaggttttgggcaaaccagcctgaaccgttcgggtgccattcgtcgctgtatttgccgccattaaagaatgaggcgctggcgcgcagcatggtatcggatgcgccattttggccgttcagcggcaactgctgttcgacggcgatgaaaaagatctgatcgcgcagcggcttccagcgcagaccggtgccggacatcggatttttcaccggcatcatcaccccgttttctccggtatcggcaaagacgcggctataaactgagagcaggtcgccttccagcagcatattgcgtccgatgcggtactcggcttccagttgtccgtagctacgatagcttttccctggcgctgcgccgccgacattattgttagcggtactcattgcgccggaacgcaagccgatggaagaatcgaaactgaacgtccagcggcgaccgacctcctcatgcaaacggcggaaattgaagcgttgttgattttgttctggggtcagtggggttatcagcgcctgattatcaatgtcatcaatcaccagccgggcgtagtgctgcgtcgcaggcatgtcatccagacgctggttcacgtaggccagttgtcggatcagtgccggatcgtccggaagccctttatgcgccggttcgagcatttcccgcgactgtgcgatatcaccgctatcccacaaggcgtaaccaagcgctgcctgggtgttgctattattcggttccagttccagcgcggcgcgcaaatcactcaccgcggccgggacattatgacgttggcgataaattgtcgcccgcgcaacgtaagcgttggcagaaggcgcaatattgattgagcgcgtgagatcgttcagtgcgagttccggctgaccaggaatgtaacgttgcgcatgcagccaccagtagagggcattgcttcccagtccacgtttttctgcctgttgtagccagcgatcgcgagccgcaccatttcctgccgcctgggcggtattggcagcagcaagcagatcctcattgctcatgtcgtgaagactgattttctgccaggccgccagtgcggtggcgtagtcctcaacctgatacgcctgataggctaccgcacgatgttgccaggcgctcggttgtcgttgttcggcctgaagccatgcatacaacgccacaccgggtagcgtgtcccgataacactttgccagacggttccaggcggcggcatcgtaggaaggcgacatatcgcccagcaagcgaactattgccgggcaattatctgcaatacccggcaactgactttgccactgacgttgctccgccagcggtaagggtttcgataaaatcgccaccttcgccggcgttgccaggtaaggatgactttccagcagagacgccagtcgcgccattaaagtctggctgacacgcgcatcgccctggaaaggatagcgttgcagcaataaatcggcagcttcgcgtgactgctcgttctgcatcagttgccaggttagttgatccaggcgggtaagatttgccggttcttgctgatacagcaatcgtgccagacgcagagcttcagccttgttacgggtcgccacgctgacagcataacgctcctcaagcatttcattggcggggagggtggcgagcagtttttgcgctgcgtcgtactgaccttcttttaacagcaccggtagcgtcgcgccaacaacatactggcggttgtcggcaaactgtaccgtataattcgccaacgcctgaacggggttagcgctgtatttagataacagatagagccaacttttctcttgtgcgtccgtggtaaatagtggcttattttcaatgagataatgctggaggcgtgctttttcgccacgataagccagcgcggtcgcgtaagtaatatatgactgaggatcggtgaagatcccctgtgattgcagtgccaggatccgatcgtccagctgcccggcaagaagcacgtcaaaccactgacggcgttctgccgcgcttaatgtgttctgctggcgtgcttcattgtatagcgtatctgcctgggaccattgtttcaggtagattgcccgttgcagcagatcggttcgcagcgtttttccttccggcgatgcagcaaacgtcgcatcgttcagttgcgctctggcgacaggtaactgtgccagccgcagggcattctgcccgacttcactgcgacaacgcagggtcggcgcagcatcgcacgctttttgctgggcaagcagttcttcaactgtcgtaacgcttttcacttcaaccggaatagccgccagactgcgctcaagtcgggcatctcctgggtgacgtttcagttgatcctcaagcaacagccgcgcccggtcatcatgaccaaaatggcgataggcttccgcaaggtataaagtcagcggaatattatccggcacctgctggtgtatatattcaaattcgcggatggcggttgcttcgtcgttatttttctgtgccttcagcgctttatcgagacggggataaataacaaaatggcgataatcgctcagccccagctcttctgcgctggtgccgatattgtctgcgagtgcgctggtactcaataaagacgtcagcagtaaaccagaccatccgatgacgcgattaaggttattctccttcattttcggactccagttgcgcaacctgttctgtgtttaaacctgctttgagtaatagtgattgcatcgaaacttgtaattcgcgttgaattgtcaggacgcgatccaacgtttcctggctgataacgccttcggtgaccaaaaacttgccgagcggcagagaactgcgttcatggcgcaataacaacacgttaattgctgaacgattaatatgaccgagcgtggtcagtatttcggcgaacaggaactgatgcggcacatattgccgccagatttcaccggcctgctgttccgtgagccactgatgctgaaccgcattgtacaacattgcccgcggatcgtgaccgcgtcggcgtgcataccagtgacgtaaccctgtgacaatttgtccccgcagaacaatgacgtaacgcactttgcgtccgactttacgcgtcagggccgccagcgaaaccgggtcaataccatcttcactgccgacaattaactcgtcattttccagacgcagcggcagtaccgcataatgcagcgccacggaggccggcatttcggcaatcagcgaggaagggatctgccaggcatcgatggattcccacgccacgccgttttgctctgccagcgcctgtgccagctgctcggcgctaatcagcccctgcatcagcattgaaccgcccaggcgtagaccttcgacgcgattacgcagtgctgtatcgagttgttcttcagtgatgacctgattttccagcagaatttgacctaacgggcgcaacgagcgggtatcgccagtcacgctggggaagtcatgcgttgttttatcccacgccacgcgacgtggatcgccgtgttgaagtacctgttttagcgcgcgccagttggccatgaagttaatcaggttgccccagaaaagacgcaggacggaaagcagcccctgcgtcaggccgtagtagccagtaacgaaaatcacccgctgcacgatgcggttaaccatcaaaccaaagtttagccacagcagggtcattaaccatgcgctgccgctgaaaatagaaaggaaatgccaggcatcgggccacaaactttcatacgccagcaacagcaaaagctggatcatcaccagcatcgcgaggaagctgacaaagttactgattgcccctttgcggtcgcgccagagaaagtagttcagcgtcaggctggaggtccatttatgggttttaaagccttggaaaacaatgccgatgatccagcgggatttttgtcgaaccgcagtcgaaaaggtatcggggaaatattcgcgcacgcagatcatgtttgatgtccgcgcgtgctgtaaaaatttacgctgctcgcgttctttggcttcgtccaccaccggaaaacggacaaaaatttccgtcatacctttttctttcaggcggaagccaatgtcgtaatcttcagtaagactctgcacgtcgaaagcaataccgtcaccgtcagctaacagtgcggtcacggcgcggcggctgaaacaggtgccgacgcctgcgctgggcacttgtccggcgagggcttcacgcaccggaacatctttgccatgcagctctgaaaactcatcaatgtaagtcatgctggtgaagtgcgtccattcgcgttcgaacggatacaccgggatctgaatcagatctttacgctcgaccagatagttgaacagacgcaattccatcggtgaaatcacatcttcggcgtcatgcagaataaaaccagcaaaagcgaaattggcgctacgctcaaattgggtgatggcgtccagcacgttgttcagacagtcggctttgctggtggggccaggacgcgcgcagactaccttatgcacattcgggaagcgagcgcacacttcgtcaacatcacgctgagtatcggggtcgttggggtaggtgccaacaaagatatgatagttttcgtagtcgagcgtggtcgccgccagctcggccatattgccgatgacgcccgtttcattccacgccggaaccataatcgctaacggtttttcatctggtttatacagttcgcggtaactcattcgcgggtagcggcgataaacactcaacttgcgtttaatgcggcgtacccagtagacgacatcaataaaaaaatcgtccagcccgctgatgaacatgatgaccgctaacgttatcgcgattacttttaagccgtagagccaggtagcaaaaacatcaagaagccagtccacacaaaaaccttacattaacgctggttatgtttagggtggcgtatattaaggttttttatgaattgtgacagctttttaccattaataggtatgactattgcggcacgttatttttacactggttataaaagttgccgtttgctgaaggattaagcgggtaatgtgataacaaaccttgtcccccgcgcatccgacgttaccgcaaccgtgcctttatgcgcgacaacaatcgatttcactatcgccaggccaataccgctaccttcaccttttcgctggcgggaggggtcaacgcgatagaaacggtcaaacaatcgcggtaagtgctcgggcgcaatgggcgtaccggggttttcgacgataacttgcaccaggtgatcgaccgtctgacagcgcactacaattgtctctccggttggcgtataacgcagggcgttcgaaagcaggttgcttagcgcccgacgcagcatcagcggatcgcccgcgacctgacacttgtcgccaacaaaccgcaactccacgccgcgatcttccgctaacgcctcgaaaaaatcgaacactttgccgacttcatccgccaggttgagcattttcttttcggggattagctggttgttatcggcctgagcgagaaacagcatatcgctgaccattttcgccattcgcgtcagctcttcgagattagagtagagcacatcttccagctccttctggctgcgcgactggctgagggcgatttcggtttgcgttatgagattcgtaattggtgtgcgaatttcgtgagcgatatccgctgagaaattggactggcgggtaaagacatcctcaatacgctcgatcatatggttgaacgacagtaccagctgttccagctcaatgggcacggtctgcgggtcgaggcgaacgtcgagatctttcgaggtaatattctggatttgacggctgacgctgcggatcggcgcgtgacctttatgtaccgccaacagtacgataaagacgatcaggatgctgattaccgatgcggtcataataagtttattcatcaaatcatttatgtaatgaagatgaaaatcgatcgaaagcgcgatgtagagcgtataaatcggtttgccgtccaccaacgggccaaccggcaagttaatcatccgccagttgctgtgttccatatgcccgtgaccgtggcctggcatcatcatcgtcgggccggaaaggagatacacctcgccaccctgagcgtctttatcgggtatggcgtcacgcgtaaactcgcggatatccggcgcaccgggggagtgatacaccgttttaccctgactatctgccagggaaatcaacacattggaataaccactgacgatatcttccagcgtcattaagcgtcgggcttgcgtttcgtcagggtgatttagtacccgttcaagggtggcgctaatctcttttaaatcattaatatcctgctcggcaaaatgaacttttactgagtggatcatgatccatgcaaaggcgaaaaacgccgcgatggtggccaggctgataaaaaaggtcaggcgggttgccagcgaaaacgggcgctgaaatggcttactgaccatccggcacctcaagcatgtaacccacgccgcgcacggtctgaattagcttcggctcaaagtcgttgtcgattttgccgcgcagccgcttcaccgccacatcaatagcattggtatcgctgtcaaaattcatgtcccatacctgcgaggcgataagcgagcggggcagcacttcgccctgatggcgaaggaagaactccagcagagtaaactctttactggtcaaagtgatgcgcgtgccgctgcgggtgactttgcggctgacgagatcgaccatcaaatcggcaacctgaaactgactttcgataatcaccgccgccccgcgccgcagtaatgtgcgcacccgcgccagcagttcagcaaaagcgaatggcttcaccaggtagtcatctgcccccaactccagccccttgacgcgatgttcaatggtgccaagcgcggtaagcaacagaatcggcatccctttattggcggagcgtaacatgcgcacgatatcccagccgttcacgtccggcagcataatatcgaggattatcagatcataatcaccggtcatcgccagatggtagccattcagcccgttgtcggccaaatcgaccacaaaaccggcttcggttaaccctttggtcaagtattctccggttttcttttcatcttcgacaatcaacagtttcatatttcctccgcatgttgcccgggcaattctagagtagcgggatcagatggcaatcgcttattggcaaaatgacaattttgtcatttttctgtcaccggaaaatcagagcctggcgagtaaagttggcggcataaaatcaccagaaattatgagcctatgtctccttgtaaacttctgccattttgtgtggcccttgcgctaaccggttgttcactggcaccggattatcagcgtccggcaatgcccgtgccgcagcagttctcactcagccagaacggcctggttaacgcagcagataactatcagaacgcgggctggcgcaccttttttgttgataatcaggtgaagacgctgattagcgaggcgctggtgaataatcgggatttgcgcatggcgacgctgaaagtgcaggaggcacgggcgcaatatcgtctgaccgatgccgaccgctacccacagctcaatggcgagggcagcggcagctggagcggtaatcttaaagggaataccgccacgacacgggagttttcgaccggccttaacgccagctttgacctcgattttttcggtcgcttaaagaacatgagcgaagccgagcgacaaaattatttagccactgaggaagctcagcgcgcggtgcatattctgctggtttctaatgtcgcgcaaagctatttcaatcagcaactggcgtatgcgcaattgcaaatagccgaagaaacgctgcgtaattatcagcagtcatatgcgtttgtcgaaaaacaactgttgacaggtagcagtaatgttctggcgctggaacaggctcgcggggtgatagaaagtacccgcagcgacatcgctaaacgtcagggggaactggcgcaggcgaataatgcattgcaactgttgctgggaagctacggcaagctgccgcaagcgcagacagtaaacagcgacagcctgcaaagcgttaaattaccggcgggattgtcgtcgcaaatcttattgcagcgcccggatattatggaagctgaacacgcgttaatggcggctaatgccaatattggcgctgcacgcgcggcattttttccgtctataagcctgaccagcggaatatcgaccgccagtagcgatctatcgtcattatttaacgccagcagcgggatgtggaattttatacccaaaattgagatccccatttttaatgccggacgcaaccaggccaatctggatatcgccgaaattcgccagcagcagtcggtggtgaattatgaacagaaaatccagaacgcctttaaagaagtggcagatgcgctggcattacgtcaaagcctgaacgatcaaattagcgcccagcagcgttatctggcatcgctgcaaattactttgcaacgggcgcgggcattatatcagcacggcgcagtaagttatctggaagtgctggatgccgagcgttctttatttgcaacccgacaaactttacttgatctgaattatgcccgtcaggttaacgaaatttctttgtataccgcacttggtggcggttgacagcaatatactcgtcatacttcaagttgcatgtgctgcgtctgcgttcgctcaccccagtcacttacttatgtaagctcctggggattcactcgcttgtcgccttcctgcaactcgaattatttagagtatgacttttaactccaggagagaataaatgaaaaaagcactgcaagtcgcaatgttcagtctgtttaccgttattggctttaatgcccaggctaacgaacatcatcatgaaaccatgagcgaagcacaaccacaggttattagcgccactggcgtggtaaagggtatcgatctggaaagcaaaaaaatcaccatccatcacgatccgattgctgccgtgaactggccggagatgaccatgcgctttaccatcaccccgcagacgaaaatgagtgaaattaaaaccggcgacaaagtggcgtttaattttgtccagcagggcaacctttctttattacaggatattaaagtcagccagtaacccaggtttaatgagatgaaaaaaatcgcgcttattatcggcagcatgatcgcgggcggtattatttctgcggcaggttttacctgggttgcaaaggcggaaccgcctgcagaaaaaacgtcgaccgcagaacgtaaaatcttattctggtacgacccaatgtatcccaatacgcggttcgataaaccaggtaaatcgccgtttatggatatggatctggtgccgaaatatgccgatgaagagagttctgcgtctggtgtgcgcattgacccgactcagacgcagaatctgggggtgaaaacggctaccgtcacgcgcggaccgctgacttttgcccagagtttcccggcgaatgtcagttacaacgagtatcagtatgccattgtgcaggctcgcgctgccgggtttatcgacaaggtgtatccgcttaccgtgggcgataaagtacaaaagggcacaccgcttctcgacctgaccattcctgactgggtggaagcgcagagtgagtatttactgctgcgcgaaaccggcggtacggcgacccagactgaaggcattcttgagcggctgcgactggcgggaatgccggaggcggatattcgccgcctgatcgccacgcaaaaaatccagactcgctttacgctcaaagcgcccattgatggcgtgatcaccgcgtttgatctgcgcgcgggaatgaatatcgccaaagataacgtggtagcgaaaattcagggtatggacccggtgtgggtcactgctgcgatcccggagtctatcgcctggctggtgaaagatgcctcgcagtttaccctcaccgttccggcgcgaccggataaaacactcaccatccgcaaatggacgctgctacctggcgtggatgccgcgacccgcacgctgcagctgcgtctggaagtcgacaacgccgacgaggcgctaaaaccgggcatgaacgcctggttgcaactcaacaccgccagcgaaccgatgctgctcattccgtcacaagcgctgattgataccggcagcgaacagcgggtgattaccgttgatgccgacgggcgctttgtaccgaaacgcgttgctgttttccaggcatcgcaaggcgtcaccgcattacgctctggtctggcggaaggtgaaaaggtggtttccagcggcctgttcctgattgattccgaagccaatatttctggcgcactggagcggatgcgctctgaaagtgctacccatgcgcattgagggaataaccaatgattgaatggattattcgtcgctcggtggcgaaccgttttttggtgctgatgggcgcgttgtttctgagcatctggggcacctggaccatcattaatacgccagtggatgcgctgccggatctctccgatgtgcaggttattattaaaaccagctatcccggtcaggcaccacaaatcgttgaaaatcaggtgacttatccgctaaccaccaccatgttgtcggtgcctggcgcgaagactgtgcgcggtttctcacagtttggcgactcttatgtgtatgtcattttcgaagatggcaccgatccgtactgggcgcgttcgcgggtgctggagtacctcaaccaggtacagggtaagctgcctgcgggagtcagcgccgagctggggccagatgccacgggtgttggctggatctatgaatatgcactggtggatcgcagcggtaagcacgatctggccgatttacgctcattacaggactggtttctcaaatatgagctgaaaaccatccctgacgttgcggaagtggcgtcggtgggcggtgtggtgaaagagtatcaggtggttatcgatccccagcgcctggcgcagtatggcatcagtctcgccgaagtaaaaagcgcgctggatgcttcaaaccaggaagcgggcggttcgtcgatcgaactggcggaagcggaatatatggtgcgcgccagcggctatctgcaaacgctcgacgactttaatcacatcgttttaaaagccagtgaaaatggcgtgcccgtttatctgcgcgatgttgcgaaggtccagattggcccggagatgcgccggggcattgccgaactaaacggcgaaggcgaagtggcgggcggggtggtgatcctgcgatccggcaaaaacgcccgagaagtgatcgccgccgtgaaggacaaactggaaacgctgaaaagtagtctgccggaaggcgtggagatagttacaacatacgatcgcagccagctcattgaccgcgccatcgacaacctcagcggcaagttgctggaagagtttattgtggtggcggtagtctgtgcgctgtttctctggcatgtgcgctcggcgctggtggcgattatttcgttgccgctggggttgtgtattgcttttattgtcatgcacttccagggactgaatgccaatattatgtcgttgggtggcattgcgattgccgtcggggcgatggtcgatgctgctatcgtcatgatcgagaatgcgcataaacggctggaagagtggcagcaccagcatcctgacgccacgctggataataaaacgcgctggcaggtgatcaccgatgcgtctgttgaagtggggccggcgctatttatcagtctgctgattatcacgttgtcgtttatcccgatcttcaccctggaagggcaggaagggcgtctgtttggcccgttggcgttcaccaaaacgtatgcgatggcgggtgcggcgctgctggcgatcgtagtgatcccgatcctgatgggctactggatccgtggcaaaattccgccggaaagcagtaacccgctcaatcgctttttgattcgtgtttatcatccgctgttgctgaaagtactgcactggccgaaaaccacgctgctggtggcggcgctttcggtgctgacggttctctggccgctcaataaagttggcggggaatttttaccgcagatcaatgaaggcgacttgttgtatatgccatcgacgctgccggggatttccgcagcagaggcggcgagtatgctgcaaaaaaccgacaagctaattatgagcgtacctgaagtggcgcgggtatttggcaaaaccgggaaagcggaaaccgccaccgattctgctccgctggagatggtagaaacgaccatccagcttaagccgcaggagcagtggcggccaggcatgacgatggacaaaatcattgaggaactggataacaccgtgcggctgccggggctggcgaatctgtgggtgccgccaattcgtaaccgtatcgatatgctctcaaccggcattaaaagccccatcggcattaaagtttccggcactgtgctggcggatatcgacgcgatggctgagcaaattgaagaagtagcgcgaacggtgccaggcgtagcttctgcgcttgccgagcggctggaaggtgggcgctatatcaacgttgagattaaccgtgaaaaagccgcacgttacggtatgacggtggcggatgtgcagttgtttgtgacttctgcggtgggcggggcgatggttggcgaaacggtggaagggattgcccgttatccaattaatctgcgttatccgcaaagctggcgcgatagtccgcaggcactgcgccagctgccgatcctgacgccgatgaagcagcaaatcaccctggcagacgtggccgacattaaagtctctaccggaccgtcgatgctgaaaaccgagaatgcgcgcccgacgagctggatttatatcgatgcccgcgatcgtgacatggtgtcggtggttcacgatttgcaaaaagcgatagctgaaaaagtgcagttaaaaccgggcaccagcgtggcattctccgggcagttcgagctactggagcgcgccaaccataagcttaaactcatggtgccgatgacgttgatgattatcttcgtgctgttgtatctggcgttccgtcgggtgggcgaagcgttgctgattatcagcagcgtaccgtttgcgctggtgggcggcatctggttgctgtggtggatgggctttcatctttccgtggcgacgggcactggctttatcgccctcgccggggtcgccgccgaatttggcgtggtgatgctgatgtatttacgtcacgccatagaggccgtgccgtcgttgaataatccacaaacattcagcgagcagaagctggatgaggcgttatatcacggcgcggtcctgcgcgtgcgcccgaaagcgatgacggtggcggtgattatcgccggtctgctgccgattctgtggggaacgggggctggttcagaggtgatgagccggattgccgcgccgatgattggcggcatgatcaccgcacctttgctgtcgctgtttattatcccggcggcgtataagctgatgtggctgcaccgacatcgggtacggaaataaaagcaggataccccgtttaaccgtgtggattgtgtcttgcgacgatgggcactaaatgttaaaaggtgcccctcaacaaaaaagacacacaggggaaaggcgtgaaaaacgcgtcaaccgtatcggaagatactgcgtcgaatcaagagccgacgcttcatcgcggattacataaccgtcatattcaactgattgcgttgggtggcgcaattggtactggtctgtttcttggcattggcccggcgattcagatggcgggtccggctgtattgctgggctacggcgtcgccgggatcatcgctttcctgattatgcgccagcttggcgaaatggtggttgaggagccggtatccggttcatttgcccactttgcctataaatactggggaccgtttgcgggcttcctctctggctggaactactgggtaatgttcgtgctggtgggaatggcagagctgaccgctgcgggcatctatatgcagtactggttcccggatgttccaacgtggatttgggctgccgccttctttattatcatcaacgccgttaacctggtgaacgtgcgcttatatggcgaaaccgagttctggtttgcgttgattaaagtgctggcaatcatcggtatgatcggctttggcctgtggctgctgttttctggtcacggcggcgagaaagccagtatcgacaacctctggcgctacggtggtttcttcgccaccggctggaatgggctgattttgtcgctggcggtaattatgttctccttcggcggtctggagctgattgggattactgccgctgaagcgcgcgatccggaaaaaagcattccaaaagcggtaaatcaggtggtgtatcgcatcctgctgttttacatcggttcactggtggttttactggcgctctatccgtgggtggaagtgaaatccaacagtagcccgtttgtgatgattttccataatctcgacagcaacgtggtagcttctgcgctgaacttcgtcattctggtagcatcgctgtcagtgtataacagcggggtttactctaacagccgcatgctgtttggcctttctgtgcagggtaatgcgccgaagtttttgactcgcgtcagccgtcgcggtgtgccgattaactcgctgatgctttccggagcgatcacttcgctggtggtgttaatcaactatctgctgccgcaaaaagcgtttggtctgctgatggcgctggtggtagcaacgctgctgttgaactggattatgatctgtctggcgcatctgcgttttcgtgcagcgatgcgacgtcaggggcgtgaaacacagtttaaggcgctgctctatccgttcggcaactatctctgcattgccttcctcggcatgattttgctgctgatgtgcacgatggatgatatgcgcttgtcagcgatcctgctgccggtgtggattgtattcctgtttatggcatttaaaacgctgcgtcggaaataaggcattcacgctacatccgacaaaacgatgtcaaccatccgaaaccgctctcatccattcgatgagagcggtttttttaattactgcttaaatgcacccgccagagagcgaatatcattgccggttggcgactgatgaagtcgcagaccaaactcttcgacaatcgcaaatatgtgatcgaatatatcagcctgaatgctttcatattccagccacaccacggtgttagtaaacgcgtagatctcgagcggtaaaccgttatcacctggagccagttggcgtaccattaaggtcatatctttacgaatccgcggatggttacgcagatattcgttcagataggcacgaaaggttccaatattggtcattcggcgcagatttaataccgactccgtagaaccttgctggcgattccactcattaatttcctgatggcggctggttaaataaggctttaacaaatgcgctttattcagacgttgcatttcgtcttcatcaagaaaacgaatactggtgacatcaatactgatactgcgcttaatacgtcgcccgccagatgctgacatcccgctccagtttttaaaggagtcagaaaccagagaccaggtgggaatagtggtaatggtattgtcccagttacgcactttgacggtggttaacccaatatcgatcaccgcgccatccgcgccgtatttcggcatctccagccagtcgcccagtttcagcatatcgttcgcggaaagctgaatacctgccaccagaccaagaatcggatctttaaataccaacatcagcacggcagccattgcaccaagaccgctgatcagaatcgctggcgactgaccaatcagcagcgagatcatcaaaatgccgaccagaatcgcgccgatcagtttaatcccctgaaatatccctttcagcggtaactgagatgctgccgggaatttctgcgccagattcaaaataacatccagcaacgagaagactgaaagcagcgcatacatcatgatccacaactgcgcgcaggtagtcagaatatctgccgcttcggtgcctttttgcagccagaataccgcctgaatattgacgataatcccctgcagggtaaaagctaaacggtggaagagtttattctgggtaatgatttgcaaccaaagccgtgaactggcgatggcacgtttttcgaaggtccgcagtaccacccaatgcaaaataatatgcaccacgacggcggtcagaaaaataataccgaaaatcatcaccatcgaggtggtgtgatcgatctcaatacccgctaaatcttcaacctgggatattaaatcctgcataacgtctcctttatacaacagcagcctatgatgacggctgaaacagggttatgcaaatcaggagaatctgagaggaaatagccgggcagatgcccggcaagagagaattacacttcggttaaggtgatgttttgcggcagacgagatttcggcagcgtagcgttaaaatcttcaacgctgtgatgacctaccggaacaaccaccagactggtgtagcctttctctttcagaccaaattctgcatcgaggatggcggcgtcaaaaccttcgatgggtaccgcgtccagacccagagccgccacgccgagcaggaagttaccgacgttgagataaacctgttttgccatccactctgcatcatcatgcagatctttacggtgcatatcagcgaagaacttgcgacctttatcgttcgcggctttcgcttccggcgtggcaaagcggccatcggcatcttcctggtcaacaaccagcttcagccagacatcgtccatcgcggtttttgcacagaacaccacgacgtgcgaggcatcaagcattttacgctcgttgaacacgtaattaccggcagcggatttggcaacacgcgctttaccttcttccgtgctggcaacaataaaatgccacggctgggagttggtgctggatgggctgtattgcagtagcgttttgatctgctcggcctgttccggggtaagttttttgctggcatcaaatgccttagtggaatgacgctttaaggcgacagaaatgatatccataaagactccatgtgaaagtaattttgcgtgccagcagattacaaggttcaacgagaaatggtaagcgagaaaaatgcgctatagatttccgctttagcctggacgcactcttttttgatcgcgtttagccagaccatcaaccaccagattccacgaatcgttgatcagatcgcgaagtaacgcttcggagatttcttcgccgggatacactgaaatccagtgctttttattcatgtgataccctggcttaatgcttgggtatatttgctgatttaacagggatttttgtggatcggacttcagattgataaaggggacgccgcgtagctccgacgacagcataaaaatcttgccgccaattttaaaaacatcgaactccgggccaaaaggccagcaaagctcgacaaagggtaactcaagggccaggcgtttcgccgtttcgtgcagtgattgcttatccataaacgttcctttaggcgaaggagaataagcaaagtatgccgcgaagtacggcgataatcgacgtttaatccgccagcgagaaccagcgtcgccagataaagcgcagaacaaaatactcaatagcgcccagcactaaaaaccacagacaaaacaataaagtgtaaagctgactaagatccatcagatggaacatggtcaccagtttttgtgccagcgccagccccagtgcgggggcgggcagcagcaggcaagagaggaaagccatcagcaaaatgcctgctgcggtggtcaaggtttctaaagggtgtttcataacattgttaaatgtaagttaaaacaccattgtcagggatattcttctgtaaggcaattcccggcttagtcaccggcccagatctcacaatgctttttcaccagcccaatcagcgagccgccatcggcgacgaaatcgcgcattagctgcgcttcattcagaccgctgacgacctggcgatgcagggcctcaatcgcgctcgatgcaccaattttatgtgcggaaggggcgattttttccagcaatcgcaaggtatcttccgttagcggtcgacgatctccagtgtgcggatcggtgatgacgccttcaagcccatagcgacaggcctggaaacggttgaatttatacagcaggtaatctttttcctgatgtttaaacgggcgttccgtcagtaaccagtgggcggtagcctgaattaatcccgccatatttactgcgtggctaagggttaacggggtatccatcacccgaacctccaccgtgccaaaatgaggactggggcgaatatcccagtgcagatctttaatgctgtcgatcatcgtggtgtaactcagacagcgaaacagggcttcaaattgttgccagttactgacccacggcatcgggccattatcaggaaaggcggaaaaaatattcggtcgtgaggaggcaaaacgcgtatccgttccctgcatatatggcgacgcggcggaaagggcgataaagtgcggcacaaatcgtgacaagccgtgcagcaaataaatggcgtcatcgccactggcgcagccaacatggacatgctgaccaaaaacggtcgcctgctgaatgagataaccaaagttttccagcgtgcgttgatagcgttcgttatcgcatacctcctgacgctgccatttctgaaacgggtgcgtgccaccgccgcaaatttccagatgatggtctgtggctgcctgcaatacgactttctgcatcgctgaaaactgcccggcagcctggttgatatcacggcaaacatccgtcgccagctccagcatactttcggtgatatcgtgctttacctctccggccgtgatcttatttttaaccgcgtcaatcagcattgaagagtcctggcttaagtcatagcccggcggattaaccacctgcatttccagttcaataccgagggtaaaaggttcagaaacatgaaaatcgggtaatggcataggtttctcttatgttggcgttttctattcagtatagaagtcggagcggctgggcgagatgcggaagttctggaatgtttcttttttttggtgatggtgaactgatggtgcctgaagcaatttggctacttttgcaatgtgacaagttatggcagtgctgactggtggcgaagaattttgacgattgagtcatgcagaaaaaaacgggttcagcttcagttgattaaatgaggagtgagaagtccgaaacaggactcactgtataaataaacagctattttgttgaggaagggtaagataacggcgggtgcctgaagctttccggtttcaggtttactctgaggtctggaaagatgaagccccaggagatatttctatcaaccctggggctgccactccaaacccgaacaatttggatggtagtcccttcttcgcatggaggcaatataaacatgctgacgaaatatgcccttgcggcagtcatagtgctgtgtttaacggtgctgggatttacgcttctggtcggagactcgctgtgtgagtttacggtgaaggaacgtaatattgagtttaaggctgttctcgcttacgaaccgaagaagtagccgttgtgcggggagtaatcccataagcgctaacttaagggttgtggtattacgcctgatatgatttaacgtgccgatgaattactctcacgataactggtcagcaattctggcccatattggtaagcccgaagaactggatacttcggcacgtaatgccggggctctaacccgccgccgcgaaattcgtgatgctgcaactctgctacgtctggggctggcttacggccccggggggatgtcattacgtgaagtcactgcatgggctcagctccatgacgttgcaacattatctgacgtggctctcctgaagcggctgcggaatgccgccgactggtttggcatacttgccgcacaaacacttgctgtacgcgccgcagttacgggttgtacaagcggaaagagattgcgtcttgtcgatggaacagcaatcagtgcgcccgggggcggcagcgctgaatggcgactacatatgggatatgatcctcatacctgtcagttcactgattttgagctaaccgacagcagagacgctgaacggctggaccgatttgcgcaaacggcagacgagatacgcattgctgaccggggattcggttcgcgtcccgaatgtatccgctcacttgcttttggagaagctgattatatcgtccgggttcactggcgaggattgcgctggttaactgcagaaggaatgcgctttgacatgatgggttttctgcgcgggctggattgcggtaagaacggtgaaaccactgtaatgataggcaattcaggtaataaaaaagccggagctccctttccggcacgtctcattgccgtatcacttcctcccgaaaaagcattaatcagtaaaacccgactgctcagcgagaatcgtcgaaaaggacgagtagttcaggcggaaacgctggaagcagcgggccatgtgctattgctaacatcattaccggaagatgaatattcagcagagcaagtggctgattgttaccgtctgcgatggcaaattgaactggcttttaagcggctcaaaagtttgctgcacctggatgctttgcgtgcaaaggaacctgaactcgcgaaagcgtggatatttgctaatctactcgccgcatttttaattgacgacataatccagccatcgctggatttcccccccagaagtgccggatccgaaaagaagaactaactcgttgtggagaataacaaaaatggtcatctggagcttacaggtggccattcgtgggacagtatccctgacagcctacaaaacgcaattgaagaacgcgaggcatcgtcttaacgaggcaccgaggcgtcgcattcttcagatggttcaacccttaagttagcgcttatgggagtaatccccgcatatccggttgtcaggtcaggatggtaaggcacctgctttacactttcgcccgtggtcagtgatggctgcgggcgaatcgtaccagatgttgtcaattaatcgtgttggcacagcgttatgactatcttttcttttatctgccagtgcacagcaaacatctcattctcacgatgaatgatgacctgctgtttattccagctaattatctgatagtccagaaaacctgcatcagtttggatctcacttgccttaaatgcgctctctttggcggaaaatgccagtgtcagcgccagagaaaaggctaaaccgcagtctgcgagtcgctcgtgttccgctggtgtaataatgttgtctgtcaattctcttgcggtttgtacagaaaaaatttcttctatatcaatgccaatcggttgacgagataccacggctaatgccgtagtcccacagtggctaatactgccgtatacctccgcaggccagacaggttggcgtagctcgccgattgcgggcacacatttatagccatattcccgcaaagcataaacagcagcgatccgtccggctaaatgctctgttttacgtttacgtccagcgtgttgcagttgtgcgtagtgcggcagccagagtaaatcctgctcacaaaaattcgccggatcgaactcaacaaaatgcagcgtatgtccggcaaaggggagggaggtatgcgtagttttcatatcgaccatattcgagactgatgacaaacgcaaaactgcctgatgcgctacgcttatcaggcctacatggtcctgcaatatattgaattggcaagatttttgtaggccggataaggcgttcacgccgcatccggcatgaacgacgcgcactttgtcaacaatctgacgttagcatcagaagtgggtgtttacgctcatataccacgtacgtcccggctcgttataggtatacgccccggcaccggcgatatagttggcccctgccaaatcgcccgtggtctgggcattacccgcacgccacaaacgtttgtcgaacagattgtccacgccgccggtcagactgacattcttcgtcacatcccaggtcgcgctcaggccaacaatgctgtaaggactaatttctttggtttccggtccaaccgctggctgacctttatagttgtacttcttcggctgctgcttgccgtaccaggtgaaggtcgtttgcatcgacaaatcttcccgtgcctgccagctcagcgttgagttcaacgtatactccgggatgatcgacaaacggtcgcccgtggttttgttttcactcttcagcatataagtgatgttattggtccacatcaccgtttcgctaaccggtacgtttaacgatccttccagaccttcaaccaccgctttcggcacgttatcccactgatagagatcggtgccgactgcgttttgccctacagccacatagcccgcttcaatcttattgcgataatcgttacggaaccaggtgacgcccgccagccacccgtcgcgtttgaactccagaccaatctctttgttgatgctggtttctgctttcaggtcatcgttaccttgcagatagcagccgcccgcgctggcatagcaaccctgacctttactgtagagaatgtagttcgggttagtctggtacaggctcggcgctttataagcacgggcgatgcccattttcagcgtgaagtcatcgcctaaaccttgcgatatgttcagcgccgggctccagttattgccgacaatactgtgatgatcgaaacgcagccccggcgttacgatggtgctgtcagtcagctccatgttgttttcggcaaacagcgagaaaatttctgcttttgaatacgggctacggtcggtggtactcacgccatcaatagcgccaccggtattcgttccggtcagtgcctgggtgttggaacttaagtccttcatccgttgctgattccactccgtacccagcgtcagcgtctggttaacgaggaaatcaatcggcaggttaacttcgctgtgcagcatcacgtcatcaagatcgatatcgacgaaatcctgtgtcgctttttcgttaaatttcccttcggtaccgcccgccagaccttccggaatacgcgagttacgggtgtgttcgtactgcacccagttgctggtggtcacgccgttatcccagccaccgttccaggtcagcgcgtagttctggcgatacagacggttggtttcatcgccatatttcgagcgggtataggaatcggagttggtattctgggtgtcgcccgcatacaggttaccctggcggctgtaacctgcttccagttccagcgattgcaatggcgcgaaatcccagcgcaccacgccattaatatctttgttgattaccccttcgcgcccggctggtaacgtcgtggcatacgttccggcacgcgcggactgatggccctggttgatatcccacgcgtcagcctgggttttgtcgaggttgccatacaaacggaagctgaattcgtcgcccagcggaccggtcaggctaaagttagtgcgtttggtggcaccttcctctttatgttctggcgcattgaaatatgcgtcccaggagccgtgccactcgccgctgccttttttggtaatgatgttaaccacgccgcccgccgcgccgttgccataacgcgcagctgccggaccacgcagaacttcaatacgttcaatcatttcaggtggcacccaggaagtatcaccacgggtatcgcgctcgccacgccagccctgacgcaccgagttacggctgcttaccggcttgccgtcaatcaaaatcagcgtgttttccggacccataccgcgaatatcaatctgtcggttattcccacgctgaccactggtggagttaccggtcaggttaacgcctggcatggtacggatgatcttcgacacatcgcgggcaaccgggtttttgcggatttcatctgcggtgatggtcgaaacgccaggcgcctgtaagttctgctcggcggcggtaacgacaatagtatcgtcatgtgaaacaggagtatcggtcggctcttgtgcctgcgctaccccataaatccccagattgaccaacaaggccagggaatgaatcttcttgttcattgttttattcctgcatttttgccacgaattgcaactgtcgggcatggtcgtcatcaacacgacgcatcccgctaccgcgaaaacctttgatcctgaaagacacgcagtgcagttggttaattaatgtccgcgcttcccacggcgcgccattacgctattgcaaatgcaaatagttatcaataatattatcaatatatttctgcaatcaatgaaaaattgcacagtaaacatggggttatggtgtgacggcgttaaaagtaggaagtgagagctggtggcagtcgaaacatggcccggaatggcagcgtctgaatgacgaaatgtttgaggtcactttctggtggcgtgatccccaaggttctgaagaatactcgacgataaagcgcgtatgggtctacatcactggtgtgaccgatcaccatcagaacagccagccccagtcgatgcagcgaattgcaggcactaacgtctggcagtggacgacacaactcaatgccaactggcgcggcagctactgctttattcccaccgaacgcgatgacattttttctgtaccatcccccgatcgcctcgaattgcgcgaaggctggcgaaaactattaccccaggcgatagccgatccgctgaacctacaaagctggaaaggcgggcgagggcacgctgtttctgcactcgaaatgccgcaagcgcctctgcaaccgggatgggattgtccgcaagcgccagaaatacctgccaaagaaattatctggaaaagtgaacggttgaaaaagtcacggcgtgtatggatttttaccaccggcgatgcaacagcagaagaacgcccgctggcagttttgctcgatggcgaattttgggcgcaaagtatgcccgtctggccagtgctgacttcgctgacccatcgtcagcaacttcctcccgccgtgtatgtgttgatcgacgctatcgacaccacgcaccgcgcccacgaactgccgtgtaatgcggatttctggctcgcagtacagcaagagttattacccctggtgaaagctattgccccttttagcgatcgtgccgatcgcaccgtggttgccgggcagagttttggtgggctttccgcgctgtatgccggactgcactggcctgaacgctttggctgtgtattaagccagtcaggatcgtactggtggccgcatcggggcgggcagcaagagggcgtgttacttgaaaagctaaaagctggtgaagttagcgccgaaggtctgcgcattgtgctggaagcgggtattcgcgagccgatgatcatgcgggccaatcaggcgctgtatgcgcaattacaccccataaaagaatccattttctggcgtcaggttgacggcggacatgatgcgctttgttggcgcggtggcttgatgcaggggctaatcgacctctggcaaccacttttccatgacaggagttgaatatggcattcagtaatcccttcgatgatccgcagggagcgttttacatattgcgcaatgcgcaggggcaattcagtctgtggccgcaacaatgcgtcttaccggcaggctgggacattgtgtgtcagccgcagtcacaggcgtcctgccagcagtggctggaagcccactggcgtactctgacaccgacgaattttacccagttgcaggaggcacaatgagccagcatttacctttggtcgccgcacagcccggcatctggatggcagaaaaactgtcagaattaccctccgcctggagcgtggcgcattacgttgagttaaccggagaggttgattcgccattactggcccgcgcggtggttgccggactagcgcaagcagatacgctgcggatgcgttttacggaagataacggcgaagtctggcagtgggtcgatgatgcgctgacgttcgaactgccagaaattatcgacctacgaaccaacattgatccgcacggtactgcgcaggcattaatgcaggcggatttgcaacaagatctgcgcgtcgatagcggtaaaccactggtctttcatcagctgatacaggtggcggataaccgctggtactggtatcagcgttatcaccatttgctggtcgatggctttagtttcccggccattacccgccagatcgccaatatttactgcacatggctgcgtggcgaaccaacgcctgcttcgccatttacgcctttcgctgatgtagtggaagagtaccagcaataccgcgaaagcgaagcctggcagcgtgatgcggcattctgggcagaacagcgtcgtcaactgccgccgcccgcgtcactttctccggcacctttaccggggcgcagcgcctcggcagatattctgcgcctgaaactggaatttaccgacggggaattccgccagctggctacgcaactttcaggtgtgcagcgtaccgatttagcccttgcgctggcagccttgtggctggggcgattgtgcaatcgtatggactacgccgccggatttatctttatgcgtcgactgggctcggcggcgctgacggctaccggacccgtgctcaacgttttgccgttgggtattcacattgcggcgcaagaaacgctgccggaactggcaacccgactggcagcacaactgaaaaaaatgcgtcgtcatcaacgttacgatgccgaacaaattgtccgtgacagcgggcgagcggcaggtgatgaaccgctgtttggtccggtactcaatatcaaggtatttgattaccaactggatattcctgatgttcaggcgcaaacccataccctggcaaccggtccggttaatgaccttgaactggccctgttcccggatgtacacggtgatttgagtattgagatcctcgccaataaacagcgttacgatgagccaacgttaatccagcatgctgaacgcctgaaaatgctgattgcccagttcgccgcggatccggcgctgttgtgcggcgatgtcgatattatgctgccaggtgagtatgcgcagctggcgcagctcaacgccactcaggttgagattccagaaaccacgcttagcgcgctggtggcagaacaagcggcaaaaacaccggatgctccggcgctggcagatgcgcgttacctgttcagctatcgggaaatgcgcgagcaggtggtggcgctggcgaatctgctgcgtgagcgcggcgttaaaccaggggacagcgtggcggtggcactaccgcgctcggtctttttgaccctggcactccatgcgatagttgaagctggagcggcctggctaccgctggataccggctatccggacgatcgcctgaaaatgatgctggaagatgcgcgtccgtcgctgttaattaccaccgacgatcaactgccgcgctttagcgatgttcccaatttaacaagcctttgctataacgccccgcttacaccgcagggcagtgcgccgctgcaactttcacaaccgcatcacacggcttatatcatctttacctctggctccaccggcaggccgaaaggggtaatggtcgggcagacggctatcgtcaaccgcctgctttggatgcaaaatcattatccgcttacaggcgaagatgtcgttgcccaaaaaacgccgtgcagttttgatgtctcggtgtgggagtttttctggccgtttatcgcaggggcaaaactggtgatggctgaaccggaagcgcaccgcgacccgctcgctatgcagcaattctttgccgaatatggcgtaacgaccacgcactttgtgccgtcgatgctggcggcatttgttgcctcgctgacgccgcaaaccgctcgccagagttgcgcgacgttgaaacaggttttctgtagtggtgaggccttaccggctgatttatgccgcgaatggcaacagttaactggcgcgccgttgcataatctatatggcccgacggaagcggcggtagatgtcagctggtatccggcttttggcgaggaactggcacaggtgcgcggcagcagtgtgccgattggttatccggtatggaatacgggtctgcgtattcttgatgcgatgatgcatccggtgccgccgggtgtggcgggtgatctctatctcactggcattcaactggcgcagggctatctcggacgccccgatctgaccgccagccgctttattgccgatccttttgccccaggtgaacggatgtaccgtaccggagacgttgcccgctggctggataacggcgcggtggagtacctcgggcgcagtgatgatcagctaaaaattcgcgggcagcgtatcgaactgggcgaaatcgatcgcgtgatgcaggcgctgccggatgtcgaacaagccgttacccacgcctgtgtgattaaccaggcggctgccaccggtggtgatgcgcgtcaattggtgggctatctggtgtcgcaatcgggcctgccgttggataccagcgcattgcaggcgcagcttcgtgaaacattgccaccacatatggtaccggtggttctgctgcaacttccacagttaccacttagcgccaacggcaagctggatcgcaaagccttaccgttgcctgaactgaaggcacaagcgccagggcgtgcgccgaaagcgggcagtgaaacgattatcgccgcggcattctcgtcgttgctggggtgtgacgtgcaggatgccgatgctgatttcttcgcgcttggcggtcattcgctactggcaatgaaactggcagcgcagttaagtcggcaggttgcccgccaggtgacgccggggcaagtgatggtcgcgtcaactgtcgccaaactggcaacgattattgatgctgaagaagacagcacccggcgtatgggattcgaaaccattctgccgttgcgtgaaggtaatggcccgacgctgttttgtttccatcctgcgtccggttttgcctggcagttcagcgtgctctcgcgttatctcgatccacaatggtcgattatcggcattcagtcaccgcgccccaatggccccatgcagacggcggcaaacctggatgaagtctgcgaagcgcatctggcaacgttacttgaacaacaaccgcatggcccttattacctgctggggtattcccttggcggtacgctggcgcagggtattgcggcgcgactgcgtgcccgtggcgaacaggtggcatttcttggcttgctggatacctggccgccagaaacgcaaaactggcaggaaaaagaagctaatggtctggacccggaagtgctggcggagattaaccgcgaacgcgaggccttcctggcagcacagcagggaagtacttcaacggagttgtttaccaccattgaaggcaactacgctgatgctgtgcgcctgctgacgactgctcatagcgtaccgtttgacggtaaagcgacgctgtttgttgctgaacgcacacttcaggaaggtatgagtcccgaacgcgcctggtcgccgtggatagcggagctggatatctatcgtcaggattgtgcgcatgtggatattatctctccagggacgtttgaaaaaattgggccgattattcgcgcaacgctaaacaggtaaattaatattatttataaacccataattacagaaaataattatgggttttttatttgtttgatttataggtttgatgaatatttctcttaaatagagtgaatgttgcattcagtggaaggaatttacaaacttcagcttcggataattatcaccaactggtaaagtgagcgccgtggagatttccccctattggactcattttcaggttataccccatgtcatcactgaatattaaacagggaagtgacgctcattttcccgattatcctctggcgtcgcccagtaataatgaaattgatttacttaatctaatctcagttttatggcgggccaaaaaaacggtcatggcggtcgtttttgcgtttgcctgcgcaggcttgctgatctctttcatcctgccgcaaaaatggaccagcgcggcggttgtcacgcctccagaacctgttcagtggcaagagttggagaaatcattcactaagcttcgtgtgctggatctggatatcaaaattgatcgtacagaagcatttaacctgtttatcaagaagtttcagtcggttagcttgctggaagagtacctgcgttcatcaccttatgtgatggaccaattaaaagaggcgaaaatcgacgaactggatttgcatcgcgcaattgtcgcattgagcgaaaaaatgaaagcggttgatgacaatgccagtaagaaaaaagatgaaccgtcactgtatacctcctggacgctaagttttaccgcgccaaccagtgaagaggcgcagaccgttttgagcgggtatatcgattatatctctacgttggtggtgaaagagtcgctagaaaacgtccgtaataaactggagatcaaaacccagtttgaaaaagaaaaactggctcaggatcgcattaaaacgaaaaatcaacttgatgcaaacattcagcgcctcaattattcactcgacattgccaacgcggcaggaattaaaaagcccgtttacagtaatggtcaggccgttaaagatgaccccgatttttctatttctctcggtgcagacggtattgaacgcaaactggaaatagaaaaagcggtcactgacgttgcggaactgaacggtgaattacgtaatcggcagtatcttgtcgagcaattaacaaaagcacatgtcaacgatgtgaattttacgccgtttaaatatcagttaagcccgtcattgccagtgaaaaaagacggtccgggtaaggcgattattgtgatcctttccgcgttgatcggcgggatggtggcttgtggtggcgtgctgttgcgctatgcgatggcatccagaaaacaggatgccatgatggcagaccacttagtttaactatttgcggttgaaggtgccgttcgtccgagcggcaccacaagcggcgttccggcaactggatcgtcaatgatcatgcagcgcagaccataaatgcgctcaatcagttcagcagtgacaatctccttcggcgctccctgagcaacaattttcccttcccgcaatgcaatcaaatggctggcgtaacgacaggcctgattaagatcgtgcagcaccgccgccagggtatagcctttttcgcggttcagttcgcttaacaactccagcaaatcaatctgatgactgatatccagccaggtcgtgggttcgtcgagcagcataattgccgtttcctgggccagcaccatcgcgatccacgctcgctggcgttgtccgccagaaagggtatccacgctttgatctgccagatgagttattcccgtggcctgcattgctttcgttaccgcttcttcatcctctttgcgccagcgggtaaacagcggttgatgcggataacgtccacgcgccaccagctcctgcacggtgatatcgcccggcgtggtagcattttgcgccaacagaccaatccggcgtgcaacctctttactggcgtaatgttgaatgtgctcgccatccagccagacatgcccatgagcaggcgtcatcaggcggcttaaggtacgcagtaacgtggatttaccgcagccatttggcccgataattgccgtgaagtgaccatcaggtatttctacagtcagattttccgcaacggtatatttgccatatcccagggttaactgttcgccgcgcaaacgggctactgattcggtcattttttgcgagactcctgaattaacaagacgataaggtaaataccgccgaggctgacggtaacgacgccaaccggaagttgatacggcataaacagttgttgggcgcagagatcggccgccagcagtaacagcgccccgcatagcgccgcctgggttagcccccagcgagcggtgccgctaatgcgtcgggcaatgtgcggtgcgactaaagcaataaaggaaatcggcccggcaagcgctgttgccgcagcggtaagcaccactgcaaccagcatcattaacagacgcgaacgttcgacgctgacgcccagcgcacacgcggtatcatcgcccatttccagcaagcgcatccggcgtaccagtaaggcggcggcaatgagcatcaatataatgatgggtgcggaaggcgaggtttttgcccacgtcaggccgttgagcgatccggcattccacaaacctgctgttagcgccgtttctaaagacgctttcagcaacagccaggtattaaaggccaccagcatggcgcgaacgccgataccgataataatcaaccgaaaggtgtcgatgccgttgcgccaggcgagcagccagaccagcagcgaagtgacaatgccgcccaccattgctgacagcgcgatagccgtcaggtcctgaccaaacagcaccatcgccaccagcacgccgctccacgccccggtgttaaagcccattacgtcagggctgccgagcgggttacgcatcagcgactgaaaaatcgcgccactgacgcccagtgctgcgccaatcaacagcgccatcagcacgcgtggtaaacgccattcggtgaccaccatcgtcatactgcgcggcgcatcgcccatcagcgcggcgaatacctgcgaggtttccagcgtgacggcaccgctgcgtaatccccagatacctgcaaccacacaggcggaaaccagcagcaaacaggtgatgagtaatcggcgagagacgtaaatcatgcaccacctcgcgttttacgtcgcacgaggaagatcagcaccggtgcaccaataaacgcactgaccacagaaacgcgcagttcgccgggcacaatcacccgcccgatgatatcggcaaacagcagcagggcaggggtagcaagtagcgtgacgggcagcgaccagcgatgatcggcacccaccagccaacgcgccatatgcggcatcatcaggccaataaaggcaatcgggccaactattgccgtcgcactaccacaaagcacggtaatcgccagcagaccaatcaactgtgtgcgcgccacgcgactgcccagcgccgtcgcggtgtcgctgccgaggctcaaactgttcagcgcgcgactcagtaatagcgcagttgctccggcgatcagcaccgggatcagcaccacttttaaggtatgtagattgcgaatatccagcgaaccggcttgccagaaacgcaactgatcgtagacgtcaggattaagcagggcgatgccgctggtcagtccttccagcaccgccgccagcgccacgcccgccagggttaaacgcaccggacttaactgcccgccgccctgactgccggtaaaggcaacaatcaatgaggccaccagcgccccggcgaaggccatcgccagttgttcctgcgcggaagagtaaccaaacagcgccgcacccagcacaatggcaaagctggctccggcgttcacgccaagcaagccggggtcggcaagtgggtttcgggtgagggtttgcattaacgccccggcaaggccaagcgcgccgcctgccagtaaaccggcaagggtacgcggcagccgcgcgtcgagcacgatggtgcagtcggcgctctggcaggtgccggagaaggcctccagcactacggaagcggggagtgattttgccccaatgagcaggcttaatgccgtcgcgataatcagtaataacagcaatccgggcacggcaatggcgcgtgtcacggcaacagaaccagacatacgaacttccatgataatgaaattaattatcgttatcgatcttatttggatatgttagcatgtgcagcctaagaataggtatttaaaatatttgatggcaaggcattgtaatgaataaacaatcctggctgcttaacctcagcctgttgaaaacgcacccggcgtttcgcgcagtattcctcgctcgtttcatctcaattgtgtctctgggtttgctcggcgtcgcggtgccggtgcagatccagatgatgacacattccacctggcaggtggggctttcggtgacgctgaccggcggcgcgatgtttgttggcctgatggtcggcggtgtgctggcggatcgctatgagcgcaaaaaagtgattttgctggcgcgcggcacctgtggcattggcttcattggactgtgccttaatgcactgctgccggagccgtcattgctggcaatctatttacttggtttatgggatggttttttcgcatcgcttggcgttacggcgctattggcggcgacaccagcactggtagggcgtgaaaacttaatgcaggccggggcgatcaccatgttgaccgtgcgtctggggtcggtgatttcgcccatgattggcggtttattgctggcgaccggtggcgtagcctggaactacgggctggcggcggcgggcacgtttattaccttgctaccgttgttaagccttccggcgttgccaccgccaccgcagccgcgtgagcatccgttgaaatcattactggcaggatttcgttttctgcttgccagcccgctggtgggcgggattgcgctgctgggtggtttattgacgatggcgagcgcggtgcgggtactgtatccggcgctggctgacaactggcagatgtcagcggcacagattggttttctctacgcggcgatcccgctcggcgcggctattggtgcgttaaccagcgggaagctggcacatagtgcgcgaccagggttattgatgctgctctccacgctgggatcgttcctcgccattggtctgtttggcctgatgccgatgtggattttaggcgtggtttgtctggcgctgttcggctggttgagtgcggtcagctcgttgctgcaatacacaatgctgcaaacgcaaaccccggaagcgatgttagggcggattaacggtttgtggacggcgcagaacgtgacgggcgatgccataggcgcggcgctgctgggtggtttgggcgcgatgatgacaccggttgcttccgcaagcgcgagcggttttggtttgttgattatcggcgtgttgttattgctggtgctggtggagttgcgacattttcgccagacgccgccgcaggtgacagcgtccgacagttaatgcttaaaacagcgccttaagcctatccagcacttgcatggcgctgtagtaatccagacggaacgtctcggttcccagcgcataaacctgcttgttttgtactgcaggcaggtgcgcgagcagcggattagcataaatagcatcggcatctttctgatcaccggcgaacaggaatagtgactcgccatttaaccctgcagccagattttccccaccaagctgaatgatgtcatggcgtttaccctgactttggctggcatttaaccctgcgggtaacttcgccagcgtaaagccgagttgttccagcatctgcccttgtgctgattctggcgtccagagattggcactgtgtgcagcggcagtatagacaatggcagtgaccggctgcggcggtaatttgatttgctctttcgccgccgccagttgcttatcaaactgcgcaatccgctctgccgcttgtttctcatgcccggtaatttcgccaagttgcgttaacagcgactgccagcttttgtcgtcgtaattgatgattaatgtcggggcgatggtggaaagctgatcatacagtgccagcgccgaatccccgccggttgcgctaattaaaatcagatccggcatttgcgcggcaacggcttcggcgctcggttcgccgatatagagccgttgcagtttgcgttctttcgccaccttgctccactggcgtaaaaagccctggtcatccgcgacgcggttattcggcgtggtcgcgccgctggcgatcaccggagcatcaatcgccagcagtgagccggtcagggtgacgctggtggaaacaatacgctgcggctggctttccagtgtatgtgtgccacggctgtcagtaatctgacgcggccagtcagcggcctgaactgcggctattcctgaaagcaaaagtcctgttaatagaagggcgttgcggtagagcggggcgagtctcacaaatcagcttcctgttattaataaggttaagggcgtaatgacaaattcgacaaagcgcacaatccgtcccctcgcccctttggggagagggttagggtgaggggaacagccagcactggtgcgaacattaaccctcaccccagccctcaccctggaagggagagggggcagaacggcgcaggacatcacattgcgcttatgcgaatccatcaataatgcttctcattttcattgtaaccacaaccagatgcaaccccgagttgcagattgcgttacctcaagagttgacatagtgcgcgtttgcttttaggttagcgaccgaaaatataaatgataatcattattaaagcctttatcattttgtggaggatgatatggatacgtcactggctgaggaagtacagcagaccatggcaacacttgcgcccaatcgctttttctttatgtcgccgtaccgcagttttacgacgtcaggatgtttcgcccgcttcgatgaaccggctgtgaacggggattcgcccgacagtcccttccagcaaaaactcgccgcgctgtttgccgatgccaaagcgcagggcatcaaaaatccggtgatggtcggggcgattcccttcgatccacgtcagccttcgtcgctgtatattcctgaatcctggcagtcgttctcccgtcaggaaaaacaagcttccgcacgccgtttcacccgcagccagtcgctgaatgtggtggaacgccaggcaattccggagcaaaccacgtttgaacagatggttgcccgcgccgccgcacttaccgccacgccgcaggtcgacaaagtggtgttgtcacggttgattgatatcaccactgacgccgccattgatagtggcgtattgctggaacggttgattgcgcaaaacccggttagttacaacttccatgttccgctggctgatggtggcgtcctgctgggggccagcccggaactgctgctacgtaaagacggcgagcgttttagctccattccgttagccggttccgcgcgtcgtcagccggatgaagtgctcgatcgcgaagcaggtaatcgtctgctggcgtcagaaaaagatcgccatgaacatgaactggtgactcaggcgatgaaagaggtactgcgcgaacgcagtagtgagttacacgttccttcttctccacagctgatcaccacgccgacgctgtggcatctcgcaactccctttgaaggtaaagcgaattcgcaagaaaacgcactgactctggcctgtctgctgcatccgacccccgcgctgagcggtttcccgcatcaggccgcgacccaggttattgctgaactggaaccgttcgaccgcgaactgtttggcggcattgtgggttggtgtgacagcgaaggtaacggcgaatgggtggtgaccatccgctgcgcgaagctgcgggaaaatcaggtgcgtctgtttgccggagcggggattgtgcctgcgtcgtcaccgttgggtgagtggcgcgaaacaggcgtcaaactttctaccatgttgaacgtttttggattgcattaaggagcgaggatgagcattccattcacccgctggccggaagagtttgcccgtcgctatcgggaaaaaggctactggcaggatttgccgctgaccgacattctgacgcgacatgctgcgagtgacagcatcgcggttatcgacggcgagcgacagttgagttatcgggagctgaatcaggcggcggataacctcgcgtgtagtttacgccgtcagggcattaaacctggtgaaaccgcgctggtacaactgggtaacgtcgctgaattgtatattacctttttcgcgctgctgaaactgggcgttgcgccggtgctggcgttgttcagccatcagcgtagtgaactgaacgcctatgccagccagattgaacccgcattgctgattgccgatcgccaacatgcgctgtttagcggggatgatttcctcaatactttcgtcacagaacattcctccattcgcgtggtgcaactgctcaacgacagcggtgagcataacttgcaggatgcgattaaccatccggctgaggattttactgccacgccatcacctgctgatgaagtggcctatttccagctttccggtggcaccaccggcacaccgaaactgatcccgcgcactcataacgactactactacagcgtgcgtcgtagcgtcgagatttgtcagttcacacaacagacacgctacctgtgcgcgatcccggcggctcataactacgccatgagttcgccaggatcgctgggcgtctttcttgccggaggaacggttgttctggcggccgatcccagcgccacgctctgtttcccattgattgaaaaacatcaggttaacgttaccgcgctggtgccacccgcagtcagcctgtggttgcaggcgctgatcgaaggcgaaagccgggcgcagcttgcctcgctgaaactgttacaggtcggcggcgcacgtctttctgccacccttgcggcgcgtattcccgctgagattggctgtcagttgcagcaggtgtttggcatggcggaagggctggtgaactacacccgacttgatgatagcgcggagaaaattatccatacccagggttacccaatgtgtccggatgacgaagtatgggttgccgatgccgaaggaaatccactgccgcaaggggaagtcggacgcctgatgacgcgcgggccgtacaccttccgcggctattacaaaagtccacagcacaatgccagcgcctttgatgccaacggtttttactgttccggcgatctgatctctattgatccagagggttacatcaccgtgcaggggcgcgagaaagatcagattaaccgtggcggcgagaagatcgctgccgaagagatcgaaaacctgctgctgcgccacccggcggtgatctacgccgcactggtgagcatggaagatgagctgatgggcgaaaaaagctgcgcttatctggtggtaaaagagccgctgcgcgcggtgcaggtgcgtcgtttcctgcgtgaacagggtattgccgaatttaaattaccggatcgcgtggagtgtgtggattcacttccgctgacggcggtcgggaaagtcgataaaaaacaattacgtcagtggctggcgtcacgcgcatcagcctgaaggagagaacacgatggctattccaaaattacaggcttacgcactgccggagtctcacgatattccgcagaataaagttgactgggcctttgaaccgcaacgtgccgcgttgttaatccatgatatgcaggactattttgtcagcttctggggcgagaactgcccgatgatggagcaggtgatcgcgaatattgctgcgctgcgcgactactgcaaacagcacaatatcccggtttattacaccgcccagccgaaagagcagagcgatgaagatcgggcgctgttgaatgatatgtgggggccgggcctgacccgctcgccggaacagcaaaaggtggtggatcgcctgacgccagatgccgacgacacggtgctggtgaagtggcgctacagcgcgtttcatcgttctccgctggagcaaatgctgaaagagagtggacgtaaccagctgattattaccggggtatatgcccacattggctgtatgaccaccgcaaccgacgcatttatgcgcgatattaaaccgtttatggtggcggatgcgctggccgatttcagccgtgacgagcatttgatgtcgctgaaatatgtggccggacgttctggccgggtggtgatgactgaagaattactgccagcacctatccccgccagcaaagcggcgctgcgtgaggtgatcctgccgttgctggacgagtccgatgaaccgttcgatgacgacaacctgatcgactacggtctggattcggtgcgcatgatggcgctggcggcgcgctggcgcaaagtgcatggtgatatcgactttgtcatgctggcgaaaaacccgaccatcgacgcctggtggaagctactctcccgcgaggtgaaataatggatttcagcggtaaaaatgtctgggtaaccggcgcaggtaaaggtatcggctacgccacggcgctggcgtttgttgaggcgggagcgaaagttacaggttttgatcaagcgttcactcaggagcaatatccctttgcgaccgaagtgatggatgttgccgacgctgcgcaggtcgcgcaagtgtgtcagcgactgttagctgaaacggagcgactggacgcgctggtcaatgcggcgggaattttacgcatgggcgcgaccgatcagctcagtaaagaggactggcagcagacttttgcggttaacgtcggcggtgcgtttaacctgttccagcaaaccatgaaccagtttcgccgtcagcggggcggggcgattgtcactgtggcgtccgacgccgcgcacacgccgcgtattggcatgagtgcttatggcgcatcgaaagcggcgctgaaaagcctggcgttgagcgtcgggctggaactggcgggtagcggcgtgcgctgtaatgtggtttcgcctggctccaccgacaccgatatgcaacgcacgctgtgggtgagcgatgacgccgaagaacagcgtattcgcggctttggcgagcagtttaaactcggcattccgctggggaaaatcgcccgtccacaagagatcgccaacacgattttgttcctcgcctctgacctcgccagccatattaccctacaggatattgtggtcgatggcggctcaacgctgggggcataagcatgatctggaaacgccatttaacgctcgacgaactgaacgccaccagcgataacacaatggtggcgcatctgggaattgtgtatacccgtctgggcgatgatgtgctggaagccgaaatgccggttgatacccgtactcatcagccgttcggtttactacatggcggcgcgtcggcggcgctggcggaaacgctgggatcgatggccggatttatgatgacccgcgacggacagtgtgtggtaggcacagaacttaatgcaacacaccatcgcccggtgtctgagggaaaggtacgcggcgtctgccagccgctgcatcttggtcggcaaaatcagagctgggaaatcgtcgttttcgatgaacaggggcggcgttgctgcacttgtcggctgggtacggcagttttgggatgaacccgacagaattagatgagattgcaggaaaactcggttaacggagtgatcgagttaacattgttaagttaaatattggtttcaactccgatttacatggttgctgtgttgttaaattgtacaaagatgttatagaaacaaaatgtaacatctctatggacacgcacacggataacaactatgaacaaatcagggaaatacctcgtctggacagtgctctctgtaatgggagcatttgctctgggatacattgctttaaatcgtggggaacagatcaacgcgctgtggattgtggtggcgtcggtctgtatctatctgatcgcttaccgtttttatgggctgtatatcgccaaaaatgtgctggcggttgacccgacgcgtatgacgccagcggtgcgccataacgacgggctggactatgtgccgacggacaagaaagtgctgttcggtcaccattttgcggccattgccggagcaggtccgctggtggggccggtactggcggcgcaaatgggctacctgccggggatgatctggctgctcgctggggtggttctcgccggtgcggtgcaggatttcatggtgctgtttgtttctacgcgccgtgacggtcgctcgctgggtgagctggtcaaagaagagatggggccaaccgccggggtgattgcgctggtggcctgctttatgatcatggtcattatccttgcagtgctggcgatgatcgtggtgaaagccctgactcatagcccgtggggaacatataccgttgcgttcaccattccgctggcgctgtttatggggatctacctgcgctatctgcgtccggggcgtattggcgaagtgtcggtcatcggtctggtattcctgattttcgccattatctctggcggctgggtggcagaaagtccgacctgggcaccgtactttgactttaccggcgtgcagttgacctggatgctggtgggttacggttttgtggcggcggtgctgccggtgtggttactgctggccccgcgtgactacctctctaccttcctgaaaatcgggactatcgtcggtctggcggtaggcattttgattatgcgcccgacgctgaccatgcctgcgctgaccaaatttgtcgatggcactggcccggtatggaccggtaacctgttcccgttcctgtttatcaccatcgcctgtggcgcggtgtctggcttccatgcgctgatctcttctgggaccacgccgaagatgctggcgaacgaagggcaggcgtgctttatcggctacggtgggatgttaatggaatccttcgtggcgattatggcgctggtttccgcctgtatcatcgatccgggcgtgtattttgccatgaacagcccgatggcggtgctggctccggcagggacggcggatgtggtcgcttctgccgcgcaggtggtgagtagctggggctttagcattacaccagatacgctaaaccagattgccagcgaagtgggtgaacagtcgatcatttcccgtgcgggcggtgcgccgacgctggcggtggggatggcctacattctgcacggcgcgctgggcggcatgatggatgtggcgttctggtatcacttcgccattttgtttgaagcactgtttattctgacggcggtggatgcaggtacgcgtgctgcgcgctttatgttgcaggatctgctgggcgtggtgtctcctggcctgaagcggaccgattcactgcctgctaacctgctggcaacagcgctgtgcgtactggcgtggggctacttcctccatcagggcgtggtcgatccgctgggcggcattaacactctgtggccgctgtttggtattgccaaccagatgctggcagggatggcgctgatgctctgtgccgtggtgttgttcaagatgaaacgtcaacgttacgcctgggtggcgctggtaccaacggcctggctgctgatttgtaccctgaccgcaggctggcagaaagcgtttagcccggatgcgaaagtcggcttcctggccattgctaataagttccaggcaatgatcgacagcggcaatattccgtcgcagtatactgagtcacagctggcgcaactggtgttcaacaaccgtctggatgccgggttaaccatcttctttatggtggtcgtggtggttctggcactgttctcgattaagacggcacttgcggcattgaaagatccgaagccaacggcgaaagaaacgccgtatgaaccaatgccggaaaatgtcgaggagatcgtggcgcaggcaaaaggcgcacactaaagtcagagtgagggggggatgttggcgaatgttggcttagtgcccagggttccctctcaccctaaccctctccccggtggggcgaggggactgaccgagcgcgttgatagcatttgtaggccggataaggcgttcacgccgcatccggcactctttcagcaacatggttagcggaggccaagatgtttgattcactggcaaaagccggaaaatatttaggtcaggcggcgaagctgatgattggtatgcctgattacgacaactatgtcgaacatatgcgggttaaccatcccgatcaaacgccgatgacctacgaagagtttttccgtgagcggcaggacgcgcgctacggtggaaaaggcggcgcgcgctgctgctaaatttgtacgtcaggctttaaacgattccacttttttgaacgctgcacgcaacgtatctggtgtcagcgtgactggcaggtaatgaatggactccaccggacgcagggtgtgggcaatcactttgtcgatctccgcctgattattgatatccacttccagctccgccagtgtagtcggcagatgaaaacgctgatacgctccagttaattgcgccagcacatcatcctgacccagcaaggcgctttgcaccagaattccgtaggcgactttggtgccgtggagaaacttctcggtttgcggcagcacggtcagaccgttatgcacggcatgagctgccgccacacgcgtaaaacgatcgcccagaccaccaaccatcccaccaccagcaataatagcatccaccacatcgcaaaatgattgcgttaactgttgattttgctgatcgctcagcgcctgttcgctactgtttaacaagacgtcgcgaatggcttgcgcattattgatccccagtcgcacggttagcggcaacgtttctggttgcggagccagcaccaccgcttcataccatttcgccagcgtgtcaccgatccccgccagcagatattgttgcggtgcattgaggataatctccggttccaccagcaccataaaattggcgtcgtcgaaaatctcataatgcagcgcctgtccggcatcattataccagacggagagcggtgtccaggcggcgcaggtggcggcgatcgtcggaacggcaacaaacggcagaccgagacggcgggcgagggctttcgcggtgtcgagcagtgcaccgccaccgacgccaatcaccacgctgcggtcgtcaccggactcagccgccagttgttgtacatcgctttcgctgcaatgaccgcgaaacaaaatatgctttgcccctggcagtccaaacgctggcggaagtttggtttgcgccgcagcaatggcgcgtttgccgtagatccacaccgcgcgagaaagttgttcatcagtgaaaaaatcgtgcaggtgattgaaacttcctggatgtgaaaagtagttagccgggccgacgaccacgcggataggattgtgaggcatgttgtgttgtccttattgttttatttagacatctaaacgtcttgattgccaaatactagcatcgtgttatagtgccttcaacacgcaacttcgtcaggtacaataaaaatgacaaataaccctctgattccacaaagcaaacttccacaacttggcaccactattttcacccagatgagcgcgctggcgcagcaacaccaggcgattaacctgtcgcaaggctttcctgattttgatggtccgcgctatttacaggagcggctggcgcaccacgttgcacagggggcaaaccaatacgcgcccatgaccggcgtgcaggccttgcgcgaggcgattgctcagaaaacggaacgtttgtatggctatcaaccagatgccgatagcgatatcaccgtaacggcaggggcgacggaagcgttatacgcggcgattaccgcactggtgcgcaatggcgatgaagtgatttgttttgatcccagctatgacagttacgcccccgccatcgcgctttctgggggaatagtgaagcgtatggcactgcaaccaccgcattttcgcgttgactggcaggaatttgccgcattattaagcgagcgcaccagactggtgatcctcaacactccgcataaccccagtgcaactgtctggcagcaggctgatttcgccgctttgtggcaggcgatcgccgggcacgagatttttgtcattagcgatgaagtctacgagcacatcaacttttcacaacagggccatgccagtgtgctggcgcatccgcagctgcgtgagcgggcagtggcggtttcttcatttggcaagacctatcatatgaccggctggaaagtgggttattgtgttgcgccagcgcccatcagcgccgaaattcgcaaggtacatcagtatctgaccttttcggtgaataccccggcacagctggcgcttgctgatatgctacgtgcagaacctgagcattatcttgcgttaccggacttttatcgccagaagcgcgatattctggtgaatgctttaaatgaaagccggctggagattttaccgtgtgaaggtacatactttttgctggtggattacagcgcggtttctaccctggatgatgttgagttttgccagtggctgacgcaggagcacggcgtagcggcgattccgctgtcggtgttttgcgccgatcccttcccacataaactgattcgtctctgttttgccaagaaggaatcgacgttgctggcagcagctgaacgcctgcgccagctttagctatttaaccgtccaggcgcgggaatattgacggtcggcaaacaactcttgcaggccgttaatttgcttcaggcgcagcacttcgtcgctgtccattcccagctctttgccaattttattatcgtcccatcccaactggctaagttcacggacgatttccgacatggcggtgatttgatggcgtccacgagcgcgattatgacgaatagtcgcggcgatgcgttgattacgcgtaccttccagacaggtcaccggcaaataaccttttaagcgtaattttaatgatgatgagcctttaccaatttcatggcggtgaaaaccatccacgatttccatggcatttttatccgtatgtgtgaccacaatgggttgggtaaaaccatctatttcaatggatttttgcagcagttttttttcgggtggtgccacgttgtttgggttgtaatcattaggcataagttggctgtttttaacccacagaacgcaatccactggctcttcacgaaaggggctaacctgatggatcgccatgcggatttcattaatcgctttgatgcgatcatcttccggcaagctggcgagaaattgcgttaaatcctgcgttaatcgttgttgcatagtatcccccattcctgacgttttccttttatccgttcgttataacgctgatagttcttcgattttgtggggctaaatgataatgcccgacaccagtaatcgttattgagtaaaactttgcatatccgccgccaggaggggatatctttcgcgccaatgtccccttgctgggtttgtggaacctcgatgccttttttctgataccagtgcaaataaatggcgattttattgcggtaatgctcagctgttttttccggcatgctattgagcagcaataatgcatattcttgccagtctaaatgttctggcttgaggattttccgatgcccatagaaatgattgtcatgtccggcgtaaatgccgccactttttaccccgctgactcgtgcgcacatagcagcccagcgatccggttcgataacgtgatagagccataatccttgtcgttgctccgggccaaaaggttcgcaaattcgcatatgacgcagaggaacgcctgcctgatacattaggttatacagtgggttgcagagactttgatgatttgcataccaggtccagatatcagccactttccagtcgtaaatggggtaaatgtaccagctatgaccgcctggtgcggccgtagtccagggtttatcgtcggcaaaacgttgtttatttaaactggcgatggcgacaaaacggttgtaggactcatccgcacggatgccgatcatcatcgccgccggacgtttttgtgaaaaccattcggcaaactcacgtacaaattgttcgaaggtcatgcctggctggtaaaagcagaaaaagtcagggtcggttatcgcatcttggggaggttgacgtacccattcgacatcaggttcccagcactgccattcgggttggtattgtgaaagggaattttgcgtcgtaagcgggagcgcaacccagtaaaactcttcgatgacatcggtgtacaactcgcgcagggactgaacatagttaatggtgcaagagaattgcgcctcccagtcgataaacaaaacgcagatttttttgcccatttgtcgggcaagttcggctgtcagatgcagcattaaaccagagtctttgccgccagaaaatgagacacaaacgcggggtagggtgttgagtgtccaggtaatacgctctcgtgcagcttccagaatattgagcggaagaggaattttataaatagacatctgaagacgctctctgaacgttacagggtgatcagtgagataagtctgttaattataaagtaaacactgtaaagcagagtgttttatttttcattcgcgctgtgaataaatagatgaaagttatagtagctgtctgtagttatatatcaaaaactctcatttagacggtcaataaatcgggagaacaccaaattatttaaagaagatttattataggaaatgtaaagctttattgaaggtaacggatgttctagttttatctcttttaagttaagaaagtcacggtaggaattataaagttcataggggactattcccagtaaatctgtaactgcaatgctattaatgattgtcagcaaagaggaaccacgaaatgagattttgcgattcataaatctctcgtctatttccatttgaatatcatcaacccctgctgatttagatattaattgggtgaactcttctgccataatttgttcataagtgctattgtcagtaattcgtggatgcctattactacaaattagagtattgcgaatcgtatgcaatggcatgcaaatgacggaacggctgatcactggcatttgggtgatcaccagatcggctttgcggtgaaccaacagttcttcagcattctctgctgacatgaggatatcatggcactcaatctcgacagaggaatcttgccgtaggcagcggatcagcatactattattagagcaagaaatgagctgagggccgtagataataaagtttttctttagttcggacttattgactatattaattgtttgttcaaggcctctgagatttttctcaagatggtgatgcagatttaaccctgttgtcgtcggcgcgataccttttcctgagcgaatgaataaagggtcattaaattgcgcacgtaagcgttgtaacgactggctcacggctgatggggtgatatatagtgattcagcagctttgctaatgcttaaatgctggtaaatacactcaaatatgacaagaagatttaagtcgaactttttcaagtcgtagagattggccatacactactccggttatatttttcttccatgatatattcacttaatcaatgttttttgcgtatatatttttattgattatgtttttttgcttaactcaggattaagtttttctaaaatagcacagccacttagggcagagcgagcaattcatgcttttttaggatggttgaaaagcagggatatagttcaaccatccatgaattaccttttatttattccccataatgatattaagcgttttctgatcgggcaaccccacggcctgttgtagcgtattttccttactcatgtaatagatagccggcgtgacatttgcccccagatcgtccatcagtttctcattgtcacttaacactttcatttgctctgtacttacgtttgcaggcacgtttagcttaagcttgccaccagaggcttcatattgttgccaggtttttgcgggatctttggaggcaagaattgccgctgctgtcgccgggctttctggcttgataaccccaaccaacaatgttcttaattgcactttgccagaatctacccacgggcgcgcctgctgccagaactgtttacaatatgggcagaacggatcggcgaagacgtagacaatgaccggcgcatcttttttaccgtcgaggagccagtgggattgttccatccgttgccacatttcgcgtccggctggtgcgtaaatttctttttcgataagtgtgttactcaggttttcacctttctcgttgtacatgtaaccagagatagcgtgcttaccatctggagtcaggtagatggtgacgcccatatcctgatactttccgagataacctttcattcctccgggggcatcgaatgttttgatgattgtaatgccctgtttttcaatcgcttttactggagcaggaagttcctctgcgaaggcgattgcaggaagcagagccagtaaaagtatcttttttaacattaatttgtccttttcagtcagtgcaaaagtcgagtaaaaggcataacctatcactgtcataggtaagagcttagatcaggtgattgccctttgtttatgagggtgttgtaatccatgtcgttgttgcatttgtaagggcaacacctcagcctgcaggcaggcactgaagataccaaagggtagttcagattacacggtcacctggaaagggggccattttactttttatcgccgctggcggtgcaaagttcacaaagttgtcttacgaaggttgtaaggtaaaacttatcgatttgataatggaaacgcattagccgaatcggcaaaaattggttaccttacatctcatcgaaaacacggaggaagtatagatgtccttgattaacaccaaaattaaaccttttaaaaaccaggcattcaaaaacggcgaattcatcgaaatcaccgaaaaagataccgaaggccgctggagcgtcttcttcttctacccggctgactttactttcgtatgcccgaccgaactgggtgacgttgctgaccactacgaagaactgcagaaactgggcgtagacgtatacgcagtatctaccgatactcacttcacccacaaagcatggcacagcagctctgaaaccatcgctaaaatcaaatatgcgatgatcggcgacccgactggcgccctgacccgtaacttcgacaacatgcgtgaagatgaaggtctggctgaccgtgcgaccttcgttgttgacccgcagggtatcatccaggcaatcgaagttaccgctgaaggcattggccgtgacgcgtctgacctgctgcgtaaaatcaaagcagcacagtacgtagcttctcacccaggtgaagtttgcccggctaaatggaaagaaggtgaagcaactctggctccgtctctggacctggttggtaaaatctaaatttccttcgtctttcacgccatagcggcgttggcgtcgcccgctcaccccggtcacttacttgtgtaagctcccggggattcacaggctagccgccttgctctgacgcgaaatacttcggaaattcacctaattcttcgggtgctgcggcacccgattttcttccccgcaccatgatgcaagctgcatccaggtagccgcagaggccgcttgcatgatgatgtttaaagcccaggagataaacatgctcgacacaaatatgaaaactcaactcaaggcttaccttgagaaattgaccaagcctgttgagttaattgccacgctggatgacagcgctaaatcggcagaaatcaaggaactgttggctgaaatcgcagaactgtcagacaaagtcacctttaaagaagataacagcttgccggtgcgtaagccgtctttcctgatcaccaacccaggttccaaccaggggccacgttttgcaggctccccgctgggccacgagttcacctcgctggtactggcgttgctgtggaccggtggtcatccgtcgaaagaagcgcagtctctgctggagcagattcgccatattgacggtgattttgaattcgaaacctattactcgctctcttgccacaactgcccggacgtggtgcaggcgctgaacctgatgagcgtactgaacccgcgcatcaagcacactgcaattgacggcggcaccttccagaacgaaatcaccgatcgcaacgtgatgggcgttccggcagtgttcgtaaacgggaaagagtttggtcagggccgcatgacgttgactgaaatcgttgccaaaattgatactggcgcggaaaaacgtgcggcagaagagctgaacaagcgtgatgcttatgacgtattaatcgtcggttccggcccggcgggtgcagcggcagcaatttactccgcacgtaaaggcatccgtaccggtctgatgggcgaacgttttggtggtcagatcctcgataccgttgatatcgaaaactacatttctgtaccgaagactgaagggcagaagctggcaggcgcactgaaagttcacgttgatgaatacgacgttgatgtgatcgacagccagagcgccagcaaactgatcccagcagcagttgaaggtggtctgcatcagattgaaacagcttctggcgcggtactgaaagcacgcagcattatcgtggcgaccggtgcaaaatggcgcaacatgaacgttccgggcgaagatcagtatcgcaccaaaggcgtgacctactgcccgcactgcgacggcccgctgtttaaaggtaaacgcgtagcggttatcggcggcggtaactccggcgtggaagcggcaattgacctggcgggtatcgttgagcacgtaacgctgctggaatttgcgccagaaatgaaagccgaccaggttctgcaggacaaactgcgcagcctgaaaaacgtcgacattattctgaatgcgcaaaccacggaagtgaaaggcgacggcagcaaagtcgttggtctggaatatcgagatcgtgtcagcggcgatattcacaacatcgaactggccggtattttcgtccagattggtctgctgccgaacaccaactggctcgaaggcgcagtcgaacgtaaccgcatgggcgagattatcattgatgcgaaatgcgaaaccaacgtgaaaggcgtgttcgcagcgggtgactgtacgacggttccgtacaagcagatcatcatcgccactggcgaaggtgccaaagcctctctgagtgcttttgactacctgattcgcaccaaaactgcataagaagaagtaagattcacctgcaattgcttagccgccggggtcaaacctggcggcttttttatggcattaaaaagccccgccgggatggctccgggcagggcgggatacttattctggcaattaacgcacaaccagcaccggcagattggcgtggcggatcacgctcgaggcgttagaacctaacagatgggtcgaaatcgatgggttgcgagaaccaataactacaacatcagcccccagttcttctgccaactcattgacttcatcccgcacgctaccaaaacggacatgttgtttaatgcgggaaggatcgatggtgaagtggctgaccatcgtttgcagacgttcttgtgcttcatgttgcagatgctcttcaaaacgacgcacatcagcggcaaaacggtgcaggctcaggctggctgacccgggtagtacgtgaagtagatgaataactccgtcatcctgggcgaggaattcagcgtggcgaacagctttgtcgctcaattccatttcaaatacatcaactggcataatgattgtcttatacataaccctttctccctgttaatcatgaacaaatcattcgccatgattataatatttatccctgatatttgtctggttctttttccttacgaactgtttctgtgatgaatatattctcactgaacaccaggaattctcccaaaacctgtggtaccgcccgttttcccgctgtgatagctacccttaaagactgactcttttttgaactgtctctggaggttgcatgaaagcattgacttatcacggcccacatcacgttcaggtagaaaatgttcccgatccgggcgttgaacaggcagatgatattattctgcgtattacggcaacggcgatctgtggctctgacctccatctttatcgaggcaaaatacctcaggttaaacatggcgatatttttggtcatgaatttatgggggaagtagttgaaaccggaaaggacgtaaaaaatttgcaaaaaggcgaccgagtggtaattccgttcgtcattgcttgtggcgactgttttttctgtcgattgcaacaatatgccgcctgcgaaaataccaatgcgggtaaaggcgctgcgctcaataaaaaacagataccagctccagcggcattgtttggttatagtcacctgtatggcggcgttcctggtgggcaggcggaatatgtccgcgtccctaaagggaatgtggggccgtttaaagtaccgcctttgctttcagatgataaagcgcttttcctttctgatattctgccaacggcatggcaggcagcaaaaaatgcgcagatccaacaaggttcaagcgttgcagtctatggtgctggtcctgtgggattgttgacaatcgcctgtgcacggttgctcggtgcggaacagatttttgttgttgatcatcatccctaccgcttgcatttcgccgccgaccgctacggcgcgatcccgattaattttgatgaagacagcgatccggcacagtcaattattgaacaaacggcaggtcaccggggcgtggatgcagtaatagacgccgtcggttttgaagcgaaaggcagcaccacggaaacggtgctgactaacctgaaactggagggcagcagcggtaaagcgttgcgtcagtgtattgcggcggtcaggcgtggcggcattgttagcgtaccgggcgtctacgctggatttattcacggtttcctgtttggcgacgcctttgataaagggttgtcgtttaaaatgggacagacccacgttcacgcatggctgggagaattattaccgttaattgagaaaggattactgaaaccagaagaaattgttacccactatatgccgtttgaagaggccgcccggggatatgagattttcgaaaaacgtgaagaggagtgccgtaaggtgattctggtacccggtgcacaaagcgcagaggcggcgcagaaggcggtttcaggtctggtgaatgcgatgccggggggaacaatatgatcgtcaggagtggttttcgaggtaaaggacagccatgacgataatcgccgccataatcagaaatcctatcaggatgtaaaatgcttctgccatggttattcccacaaacgaaacggaataattttgcagcaaaagtgaacagtgagaaccaggaaaaattgctgattttgcgtaaagaggatgcgagtgcatcctctgggcaaagcgagttatcgcttgtgcagatgggattaaagcaggtagtcgccagcagcttctggctggtattcgagttccagcacttcaaggtgggttgcaacgccgcccggaagttcccagtgaatggaatcgccaacgcgcagccccagcagtgcggcacctaccggagccataacggaaagctgagtattgctatcggtcatttttgccggatacaccagcgtgcgcacacgcacttcgccatcgctaagattgcggaatttaacccggctgttcattgtcaccacgtcgtgtggcatctcttctggcgaacacatttgggcgcgatccaactctgcgtttaacgcgtcggcgattggcaaaccagcataggcgggttgctccagcagaatatcgatgcgttcggcatccaggtcgttaatgatgatagttggtctggacatttttactccatgtcgtcggtgctgcgagtgtcgcagataaacatacccaaaagaaaaccctcaccgtcaggcggcgagggtttaactcacatgatgatactgactgttgctcactctttgaagtgatttgcgtcacattcagggaattcctcaatgcagcgcattatgtataaatcttaatcgccttggtttatggaagacgaattagcgtgttttgtaaatcagatgattaataacccgctttatcaatcacaaaggttttgccacagttacctgggtgaggttgtggcaagaatgagtttgcagaaagcggagcgttgatggcgtcagctttgatcgagatctgaatttcagtcaaatacgcagggttaccctggcacgttagcttaactgctttcacgttctcttttccccagcttttggcaaaggcggcgtcaaagtcacggcggctcactgttttaccgtaattatccgcaaggaattttccggcttcgctctctttaatttcttgattcaggcgtaccatcgtaccgaagtatgcgtccggatcaaaaccaaagcaggcaccgtgtttggcatattcgtagcgttccaggcaggaacgtccgccagctcctggcatgacttcacttagtttagcggccgtttccagtgataatccggtttccggcgatgaacacattcggctggcgcgcgcttctggtagattcgggattgggcgagtagcgcaaccgaagcgcatccagcggcgttcatcaacaccacgggcagcaaccgatttaggcaatcctggccacagaccatgtacggtcagaaaatcagctttgttggtcgtttcggtttgcaggcgacattcatctcgttcgttacgatttcgatcgtgttgactctggcaaaatccggtttgccaggagagggccaggacatagcgatcaaaatcgccatactgttttgcctgcaacgctaaggcgttggcagaagagaagggaagcagagaaaccgcgagcaacgcggcgttacgccagaatgctttcataatgggtgtggaactcatacatacactgaatactatctattaaatcataaaaaagcccgccaggtgggcttacctggcgggcgtgatgatttattcagcgtttggcgaacgtattagttccacatggcgagaatcggccagccaaccaacagcaacatagagatgtaaatcaccccgaagattgcgccaagacgccagtaatcttttgatttcacatagccacagccgtaaataatcaccccaggaccggttgcatacggcgtcagacagcccatgataccgatagacagcaccagcaggatacacagttgttccattggtacgcccggaatacctttaccgacggccagaataaccggcagcatggttgcggtgtgcgcagacaggctggcaaacaggtagtgtgcaaagtagaacaccagaaccagtacaatcaccgttgcgtttggtgagaatccttccaggtgcgtactcatggtaccggcgaaccagtcaataaaaccagaacgagtcaggccgttagccatcacaaccagagttgccaggttgaccagtgtgttccatgcgctgttatagcgggtaatgtctttccaaggcacaacgtgcagggccagcattagcgaaactgccagcagaccaaccgcagtagcattaatgacttcactgccaaatacccacaaacctaagctgagcaatacaaggccaatcagtgtccactctctgcgtgtcagcgcacccatggttttcagttcatcacccgcccaggttgccacttcttcactgtgtgtgatttccggtttgtacagcacgtaggaaagccacggcgcaatgataagcaagataaccccaaccggcaggaagcagaggaaccactgcaaccagctaatctggataccggcaattttgctgacgaactccagacccagcacgtttggtgccgcaccggtgacaaacatggacgaactcagactggtactaatgaccatcatccacatcaaatagccgccaatacgacgcgcggacggatcgttcgggaatgatttaaacaacggcggcaggtttttaatgaccggaaaaaccgtacccccggtacgcgcggtgttggaaggtgtaaacggtgccagcagaatgtcgataatgacaatcgcataacccaacgtcagcgtgcgtttgcccatgaatttcaccaggaaaagggcaatgcgacgacctaacccggaaacttcataccctaatgcaaaaataaatgcgccaaataccagccataccgtggtgctggaaaaaccagccaggccccatttcagcgcctgtttttgcgcattaaacgctgggtcagctaattctttggcatcaaagagcaggtaattactgccaataacgcaaatagtaaccgcaataaaactgatcgctgttgccggaattggctcgaggatcatgccgacaatcattgccacaaacacagcgaagtaatgccatgcctgcggcggcataccgtcggggacagggataagaaacatgacacccatcaccaccagtggggccaatagtttccatatattatcttttgctaaagacatacgggttctccgaaaattaatatttccaaatttatcaagtgcttaaataattaaatctgtgctaaaaaccaggtaaggatcagtaggtcagcactgccgcctggactgagatttcgttcgatacactccctgtcgaactgccggagataatcgagatcggcgggggttcgaatgccccctttttgcaataatgtttgcgcctcgcgctgtagccagcgcaggcccccctcgccaccgcgcgatgcaacgttggtatcgccgttgatcgccatcagtaggagcaaggtatcgagcaatgccagttcaggatctaacccctgatccagcagagtgaggtaatgcggcaaggcgtgattgatcaccagtggataacccgcttcggcttcaccgcgtgcgccggtaaggccaagctgttggtacaaccgttgacctgccgtcagttgtgaattattggtacgcagttcgcgatcggtcaggccacggcagaaacttgccgccgtagaacaaacggttgttggcgttaccggttggttgagttgaagcaaacggccaattgccgcacatagcagccctaaagaaaaaatgctgcctttatgcgtgtttacgcccgcagtggcgcggaacatatcaccttcgcaagccataccaattgggcgtaatccgtggagtaccgcttctggtgccatttccgcactacaggcaccaaattcaatgaaacggggtagccagccctgaatcgccagcgcgctgcggtggaaatcttccagcgccatatctttgtgcgcaccgcagttaatgcgatccacgaggcctggtttcggtgacagattgacttcagtcagcatggcgcgccagcccagcagggcgtactcatcgattaatgacgtcgcaagctttgtggttttagttgacgttgcaggcatcgacatcgttcagcagtgcctccatgcggttgagtaaatcggtcagttgatgggtttttccacgcgcgcagacggctgcgctttgttcgcacaacaggcagcggcgaggcggcagtgaatagtcgcggcgggagagaatttcgccttcgggcgtcaggacatcgatatcccataaccgcccgagaggatgactatgttcaagctcaatggtggcgagcttgaggtcgcgagccggggcggcaatgctcaacatgccctccggcccgctggcggaaaccagtgcagcctgctcctgaatttgccagccctgttttgcggctaaggcacgcaaggctgtcacgccatgattaaaaattcggcgtgtgacctcgctgtctttaatcggcccaggcgcaaccacggtaaaggagaccagtggaacaggatggcgcttgagccagacgtgttgccgtgcttgcctttcatcccggctgacgagcagctcgggaattgataccgcatggtggctggcgagttcaggaagcaggtgcatggcttattccttcacctgatgcacaacatcgatcaccgagccatcgcggtaacgcacaacggcaacgacgcggtctgtgaattcaatcggctgtggttcaccggtcagcagacgcgcacgttcgcgcagccactcaatggaaaccactttaatgcccgcttcctgcagacgttctgccagttccggacgtgccgggttaactgcgataccgtggtctgtgaccagaatatcgacactggagcctggggtgatgcaggtcagtacgttatccaccagagtcggaatacgaccgcgtaccagcggcgcgacgatgatggaaagcgcagaggcaatcgcggtatcgcagtgaccaccggaagcaccacgcagtacgccgtcagagccggtcagcacgttaacgttgaactgggtgtcaatttccagcgcgctcagtaccaccacgtcgagacgatcaaccgatgcgcctttcgaaccccagttagcgtactggttggcgctgatttcgatgtgattggggttacgggccagcgattgcgcagcatggctgtcaaagctctgcacatccagcagtttgcggatcagacctttttcgtgcaggtcaaccatcgtcgcggtaataccgccaagggcgaagtcggcgcgaatatcgcggctacgcattttgtcttccaggaaacgggttaccgccagcgatgcgccgccggtgccggtttgcatggagaaaccttctttgaagtagccagagttgacaatcacatccgcagcgctacgggcaataagcagttcgcgcgggttagtggtcatacgggtcgcgccagcgccgatttttgcagcatcgccaacgcggtcaactttgacgatcaaatcaacctgatcttgctcaatgcttgccggattatgcggataaggcagcagttcttcggtaagcatcacgacctgttttgcgttgtcggcatcaactattgcatagccgagggagccgcagcaggctttaccggtgtagccgttggcattaccgaattcatcacaggacgggacgccgaggaaagccacgtcgatattcagttcgccgctctgtaccagatgcacacgaccgccgtgagagtggatctgcaccggttctgccagcagaccacgggagatctcttccgccagtggaccacgcaggccggaggtataaatgcgggtaaccacgccctggcgaatgtgttctaccagcggcgcatggcaatcactcagggagctggacgccagggtcaggtttttaaagcccatcttcgcgatgacgtccatcaccatattgacggtcaggtcaccgccacggaaagcgtgatggaaggaaaccgtcatgccgtcctgtaaaccagagcgacgaatcgcttcttccaggttggcgcacagtttgcgatcgcgcgctttttcagcctggtaggtttgctttggcgagttctggaaagcggcaagatcgcattcagcgcgacgattccaggccgctacccgttcttgtcgttgagattgttcaattttctgcgtcattttgattgccttattcttcgcggatgccggaaagttctgcacgggagagcaccagacgggcgcgatcgataaccggaccgtccaccatcttgccgttcagggaaaccacgccgaggccttcgcgagcggcggcttcagcggcttctacgacgcggcgggcgtgatccacttctttctgggtcggtgcgtagaggttgtgcagcagatcaatctgacgcgggttgatcagcgatttgccgtcaaagcccagctgtttgatgtgggcggcttcttgcagaaatccggcttcgttgttagcgtcggaatagacggtatcgaacgcctgaatacccgcagagcgcgcggcctgcaaaatggaacagcgtgcgaacagcagttcagttccttccggggagcgttctgtacgcaggttgcgcacatagtcttctgcaccgagggcgataccgatcaaacgctcggaagcgtgagcgatttccactgcgcgggtaatccccagcggagattcaatcgccgccagcaggccggtgctgccgggttcacgaccacaggctttttcgatacgcaggatctctttttcaatatccagaacatcctgagcggtatcggttttcggcagacgcacaacgtccgcaccaccgcgaacgacggcttccaggtcgttaacaccccattcggaatccagcgcgttgacacgcacaatggtttcaatatcgcgatacagcggatgttgcagcgcgtggtaaaccatgcggcgggcggtgtctttttcacgcaatgctacggagtcttcgaggtcaaacatcagggcatcagccgggtagatgaaggagttgctgaccatcgcggcattggcaccaggcacaaacaacatgctgcggcgggtgcgagttttacgttgttgcagcgaagcggaaatcattggcaatcctcccatggcagagccgggataccgctggcgcgtgccagcagggcttccagtcgtgcacgtaaaatgcagtccagtgcgcctttgtcatcgacattcagctgtacgccgcgcacgttgtagcgggcgagaacgtccagaatggtggtgcgaattgcatcgccaaactgtttctcaacgctgctattgatttgcaggtcgatatcctgcgtatcgagtggggcgatgcgtatcatcacatccccagactcaagggtgcctgcaacggcgggctggtttattttcatttttcacctgtttctcatgcgggggtcttttgacgagctgccgcgtcctggcgggagtgctcaagcaggttctgcaaataatgcagcgtgactgcagggaccagcggcgcgatagccgtgagatcgtttttcgccagcagttgacgtacccgggaagcggatatcggcatctcctggtaacgcagccgctcaatttcaaccagttcgatgggcggtgcggagatagtcggcgtttccagccagtagcgcatatcctggttgtactgggcggtaacgcgacaaaagggttcagtaccgacaaagcggtgagttacacccagcgcgggagcgaggtactgacggaaaatcttcagatcaatttcggtgtaacaatggttaatgacgctctgttctttaatgaagtagcaagggaacgtagcgcgggagatgatgtattcggagccacgatgcacagtcaggcgtggaatatcggcggtgccttttaacaccaaatccagccggtcttcataggggaagcgtgaagaatcttctttgactaaaaacagatgcaaccagtcgcactgtgccgcagcctgttgaatcagataacggtgaccattcgtaaagggattggcgttcatcacaatgcagccaatcttgttccctggatgacgaaattttttcagcgattcggcatagcgtttcagtcgcgtggcgctgttttccatcagcaccatcacgccgggtacgctggtcagcgtggaaaaaccgcactggcggaacagcgcctcgtattcggttttggtataaataaacagatgcgtgctgtgccgctcataggcgaggtttatcaattcagtggctaatgtcagcgccagtccttcaccgcggacggattcactgatagcaacgcatttaataatatttccggcaattccaccgcacgcgataagcttttcatcgcgggttacggtaataaatacttcgactgtggtgtcaacgctcaaatcattttcatgcaggaattgggcgatttccgccatttttttattttctgaacgttttacgcgggtgaaaatatcattgccgaacataataaatagtatcctgaaggtgcatgttgttatcgatttgcaacgaatgttgttcaatgttgcaaactgataaccttttattttcacttgggagaaagggggtgatcgaggtatatctttttctcctttcgctatacatcctaaggagtatttcggcgtgaaattttgatttatttcacatagagttagtggttttttatttatttaatgattttaagttttttaattaatgtaattacgaaatgactcgcaggtttaagtgatttaattgatttaatgaataaaatttgccacgatcataattaatatctatgtattttgattcaacattttaattacatccgtcaaagaggctcgggacaacccgcaaggaaaacaatgttgcagcttaacgagaataaacagtttgcatttttccaaagactggcatttccgctgcgtatctttttgctgattctggtgttctcaatatttgtcattgcagccctggcgcaatattttacggccagttttgaggactatttaacgcttcatgtacgcgacatggcaatgaatcaggcgaaaattattgcctccaatgacagtgtcatctctgcggtgaaaacgcgtgactacaaacggctggcgaccatcgctaacaaattacaaagagataccgattttgattatgtggtgattggggaccggcactcgatccgcctttaccatcctaatccggagaaaattggttatcctatgcagttcaccaaacagggcgcgctggagaaaggggagagctacttcattaccgggaaagggtcaatggggatggcgatgcgcgccaaaacgccaatctttgatgacgatggaaaagtcatcggcgtggtgtcgattggctacctggtgagtaaaatcgatagctggcgggctgagtttttattaccgatggcaggtgtgtttgtcgtgctgttagggattctgatgttgctgtcgtggttcctggccgcgcatatccgtcggcagatgatgggcatggagccaaagcaaatcgcacgcgtggtccgtcagcaagaggcgctgtttagttcggtttatgaagggctgattgcggtggatccgcatggttacattaccgccatcaatcgtaacgcaagaaagatgctggggctgagttcccccggacggcaatggttgggtaaacccattgttgaagtggtcaggcccgccgatttctttaccgaacagattgatgaaaaacgtcaggatgtggtggcgaactttaacggtctgagcgttattgccaaccgggaagctattcgttcaggtgatgatttgctgggggccattatcagctttcgtagtaaagacgaaatttccaccctcaatgcgcaactgacgcaaataaaacaatacgttgagagccttcgtacattgcgacacgagcatctcaattggatgtcgacgctcaatggtctgttgcagatgaaagagtatgatcgcgtgctggcgatggtgcagggggagtctcaggcccagcaacagcttattgacagcctgcgcgaggcgtttgccgatcgccaggtggcggggctgctttttggtaaagtgcagcgcgcccgggaactggggctaaaaatgatcattgtccccggtagccagctttcgcaactgccgccaggactggatagcaccgagtttgcagccattgtgggcaatttacttgataacgccttcgaagccagcctgcgtagcgatgaaggaaacaagatcgttgaattattcctcagcgatgaaggcgatgatgtggtgattgaagtcgccgatcagggctgcggcgttccagagtctctacgagacaaaatatttgagcagggggtcagtacgcgtgctgacgagcccggtgaacatggcattgggttgtacttgattgccagctacgtaacgcgctgcggtggtgttatcactctcgaagataatgatccctgcggtaccttattttcaatctatattccgaaagtgaaacctaatgacagctccattaaccctattgatcgttgaggacgaaacgccgctggcagagatgcatgcggaatatattcgtcacattcccggattcagtcagatattactggcgggaaatctggcgcaggcccgaatgatgatcgagcgttttaagccggggctaatcttgctcgataactatcttcctgacggtagagggattaatttactgcatgaactggtgcaggcgcattatcccggcgacgtggtgtttaccactgcagccagcgatatggaaacggtgtctgaagccgtacgttgtggtgtatttgattatctcattaagcccattgcctatgaacggctggggcaaacgctaacccgtttccgccagcgtaaacatatgctggaaagtattgatagcgccagccagaagcaaattgatgagatgtttaatgcttatgctcgcggtgaacctaaggacgagctaccgaccggcattgaccccttgacgctaaacgcggtgcgaaaactgtttaaagagcctggtgtgcaacatacggcagaaacggtggcgcaggcactgaccatcagccgcaccactgccaggcgttatcttgaatattgcgccagccgccatctgattattgctgaaattgttcacggcaaagttggcagaccacaacgcatataccacagtgggtgacatgataaagccggaggaaacttgcctccggcattactatttacttgcctgtgaccgctgctgccgttcctggcaccatcagctctgtagcaacgataacaatcaccaaaccaacaagcaccggtaccgaggtgcgttttacgacttcaaacggcgagatcttcgccatcccggcaaccgcaacgactacgccagaaacgggcgaaagggtacggccaaggtttgacgcctgcagcatcgggatagtcaaatacgccgggttaatgccggaagagtgcgccagtttcgggatcatctcaacaaacgcataaaacggcgcattgcctgaaccggtcgtgactgccgccagcattgtcagaatcaccaataccagcatcaggatgatactcgccgaaccaaacgaggtagcgatagaaatcagactttgaataaagccgatggtgctaaggaaggtgcgaacaagtccctgatatgagatcatgtttgtcatctggagccatagaacagggttcatcatgagtcatcaacttaccttcgccgacagtgaattcagcagtaagcgccgtcagaccagaaaagagattttcttgtcccgcatggagcagattctgccatggcaaaacatggtggaagtcatcgagccgttttaccccaaggctggtaatggccggcgaccttatccgctggaaaccatgctacgcattcactgcatgcagcattggtacaacctgagcgatggcgcgatggaagatgctctgtacgaaatcgcctccatgcgtctgtttgcccggttatccctggatagcgccttgccggaccgcaccaccatcatgaatttccgccacctgctggagcagcatcaactggcccgccaattgttcaagaccatcaatcgctggctggccgaagcaggcgtcatgatgactcaaggcaccttggtcgatgccaccatcattgaggcacccagctcgaccaagaacaaagagcagcaacgcgatccggagatgcatcagaccaagaaaggcaatcagtggcactttggcatgaaggcccacattggtgtcgatgccaagagtggcctgacccacagcctggtcaccaccgcggccaacgagcatgacctcaatcagctgggtaatctgctgcatggagaggagcaatttgtctcagccgatgccggctaccaaggggcgccacagcgcgaggagctggccgaggtggatgtggactggctgatcgccgagcgccccggcaaggtaagaaccttgaaacagcatccacgcaagaacaaaacggccatcaacatcgaatacatgaaagccagcatccgggccagggtggagcacccatttcgcatcatcaagcgacagttcggcttcgtgaaagccagatacaaggggttgctgaaaaacgataaccaactggcgatgttattcacgctggccaacctgtttcgggcggaccaaatgatacgtcagtgggagagatctcactaaaaactggggataacgccttaaatggcgaagaaacggtctaaataggctgattcaaggcatttacgggagaaaaaatcggctcaaacatgaagaaatgaaatgactgagtcagccgagaagaatttccccgcttattcgcaccttccctaagcccctgagcgaataccccagcggcaaccagcagcatcaccacgttagcaaacgcatctgccatcccgcgataagccacttccagaccagagaaaactttctgggtattaaagctgcggaggaactccagaatggaggcaatcagcatacaaatcaccagaatagtgatgatgtgtaattgcggaccccatttaccgtcaaaaatcagtacaccgatgatcggcgtgaacggcaaaatggcataaaacgcaggagcagtggtggtgatttcactgacatctaacatttcatgagagatgtgctcttttttatccagataacgttgccagaagaagtgggcgatcgccatgccgataattgcagcaattgagataggcagcgtcgttttgaaggcgaagtcaatcagcgacatttcggaagcttgcgccgccagcaccacatcccctgaagtcggtgcgagaataatcgccgccggggaggcacaaatggcagcagctgcgccacgactgataccaacgtttaccatcaccggaaatagggttgccatcagcaaaacacccagaccggttgcggaagagacggccagagacatcagacaggcgacaaaataggcggcaatcatcagcaggtaaggggagttaatatactgcaatggttttgacgccagcttgaccaccatatcattcgcgccgatatgggtcatgtaagcggcaaatccacacagcatcataatcatcatgccgaggtcgccgccgcggctcattagtaatattttaacgtattcaacgatatccgtggcgctgtagcctgttgaagcctggctggacggtaacactttgtgccccataatggcactgataatcagcaataacaggccaccgacaaataacacaccagtggcggaataccctttaatgatgtagcgagctacacccacaataaccacaaccccaataaggagctcaatgaatgtcagcataatttttcctgtctccaggccccaaagtaaataataaaaaattcctaaagcttaaggaaaaaatatgcccaataaattggcgatgaatgctgattaaaatcaagaaaaactgccattaagacattgaagttgctgtttttatacatagataacaaaacgcatatttagcggttggcaattatcacataataatgtgtgcaaattgatggtggattgatgcaaatttgttaattgcaatggtgttagctgcggctgtgcgctcaaaaaataatctaatatgagcataggttgacgatatatattatatacttcgttaagatgattgttgtatctcgttaaaaaataaaataatttttccttgattgcattttgtcatcaaaaaagacttggtttttcttttttgactattcccatcgcagaaaacgacgcatcatctttaatcgatgcgcggaaatatttaacttgaacaagcggaaataaatagagcagctattcagattattctttatgttgggtctattaaggttatgttaattgtagctttgctatgctagtagtagatttttgataaatgttttatggtcacaaatgaacgtgagtaaatatgtcgctatcttttcctttgtttttattcagttaatcagcgttggtaaagtttttgctaacgcagatgagtggatgacaacgtttagagaaaatattgcacaaacctggcaacagcctgaacattatgatttatatattcctgccatcacctggcatgcacgtttcgcttacgacaaagaaaaaaccgatcgctataacgagcgaccgtggggtggcggttttggcctgtcgcgttgggatgaaaaaggaaactggcatggcctgtatgccatggcatttaaggactcgtggaacaaatgggaaccgattgccggatacggatgggaaagtacctggcgaccgctggcggatgaaaattttcatttaggtctgggattcaccgctggcgtaacggcacgcgataactggaattacatccctctcccggttctactgccattggcctccgtgggttatggcccagtgacttttcagatgacctacattccgggtacctacaacaatggcaatgtgtactttgcctggatgcgctttcagttttgagacaaatgaagttttagtaacttctttaaaatcaatagctaaaataagtaacatcaaaaataacgcgacttttatcactttttagtaaagttacactggacaaagcgtaccacaattggtgtactggtaaccgacacagcatttgtgtctatttttcatgtaaaggtaattttgatgtctaagattaaaggtaacgttaagtggtttaatgagtccaaaggattcggtttcattactccggaagacggcagcaaagacgtgttcgtacacttctctgcaatccagactaatggttttaaaactcttgctgaaggtcagcgcgtagagttcgaaatcactaacggtgccaaaggcccttctgctgcaaacgtaatcgctctgtaagatacgtcagcaagaattcaaaacccgcttaatcagcgggttttttttggtctttagtgtgcggttgaggccgaaaacagccagaatgccagtgcggtcatggcaaaagaccccagaaggttgacgaaaacgttcagtaatgcccagccaaagcggccctcttgtaacaaaaacaccacttctgccgaaaatgttgagaaggttgttagaccgccacaaaatccggtggtgattaatactttccacactggatcaatgttcgtcatcctgctgaaccatgcgaatcctattcctatgatgaatgccccaatcaggtttgctgtcagcgtccccaacggaatcgcctgatgcagtgggttaaatcgcatacttaacagccatctcgccacgcttcccgtaccaccgccaataaaaactgctaaaagaagttgtaacactgcaaaatcctgctatttgatttgtatgagtgataagtgtaacgccgaataatcgtcgttggcgaattttacgactctgacaggaggtggcaatgctggttgccgcaggacagtttgctgttacatctgtgtgggaaaagaacgctgagatttgtgcctcgttgatggcgcaggcggcggaaaacgacgcatcgctgtttgccctgccggaagcattgctggcgcgcgatgatcatgatgcagatctatcggttaaatcagcacagctgctggaaggcgaattcctcggactttacggcgagaaagtaaacgtaacatgatgacgacaattctgacgattcatgttccttcaacgccggggcgcgcatggaatatgctggtggcacttcaggcaggaaacatcgtcgcccgttatgccaaactgcatctctatgatgcatttgccattcaggaatcacgccgtgttgatgctggtaatgaaatcgctccgttactggaggtggaagggatgaaggtcggtctgatgacctgttatgacttacgctttccagagctggcgctggcacaggcattacagggagctgaaatcctggtacttcctgccgcctgggttcgcgggccgctcaaagagcatcactggtcaacgttgcttgccgctcgtgcgctggataccacctgttatatggtggcggcgggggagtgcgggaacaaaaatatcggtcaaagccggattatagatccctttggcgtcaccattgcggcagcgtcagaaatgcctgcactcattatggcggaagtgacgcccgaacgtgtgcgtcaggtgcgcgcgcaactgcccgtcttaaacaaccgtcgctttgcgccgccgcaattattatgatgtttttttactcggcgcttgattcaccttgttacagattgctattgtgtgcgcgcgtcgaatgaccgttaatattctctggtttttaaggcgcgttctgttgccggttatatgtcaagaaggtatctatgggtgagattagtattaccaaactgctggtagttgcggcgctggtcgttctgctgtttgggactaagaagttacgtacgctgggcggagaccttggagcggccattaaagggttcaagaaggcgatgaatgatgacgatgctgcggcgaaaaaaggcgcagacgttgatcttcaggctgaaaagctctctcataaagagtgacgtggcgagcaggacgctccctcaatatcttgttcgatacaaaaaacccgcttcaaaaagcgggttttttatcagacagatgtaagtaattattacaggattacttaacttccatccctttcgcctgcaaatcggcgtggtaagaagagcggacaaacggaccgcatgcagcatgggtaaagcccatcgccagcgcttcggctttcatttcgtcgaactcatccgggctaacgtaacgttgaaccggcaggtgatggcggcttggctgcaaatattgccccagcgttaacatcgtcacaccatgacggcgcaggtcgcgcattacctcaataatttcttcattggtttcacccagtcccaccatcagaccagacttggtcgggatttccggatgcgcttctttaaagcgttccagcagcttcagcgaccagttgtaatctgcaccaggccgtacctgacggtaaatacgcggtacgttttccaggttatggttgaacacatctggtggcgttgcagtcagaatatccagagcacgatccatacgaccgcggaaatccggcaccagagtttcaattttgatttgcgggcttttttcccgaatggcagtaatgcaatccgcaaagtgctgggcaccgccatcgcgcaggtcatcacggtcaacggaggtgataaccacataacgcagcgccatatcggcaatggtctgcgccagtttcactggttcattggcatcaggagctaccgggcgaccgtgggcaacatcacagaacggacaacggcgggtacaaatagcgccgaggatcataaacgttgctgtgccgtggttgaagcattccgccaggttagggcaggaggcttcctcgcagacagaatgcaggccatttttgcgcattgcggctttgatgccctggatacgtgtagagtccgctggaagcttgattttcatccattccggcttgcgcagcagggcttcgcgctctgttgccacgtttttaaccgggataagggccatcttatcggcatcgcggtatttaacaccgcgttccatcacaatgggtttactcatagcgtgcgtgttccagttgcgaattacgaaggaaagcgtttcaattcaatagattgttgtaattatcaactatttttgaattaacgactggcagtatatcattgaaacggacctgaaagcagccaaagcggtcgcgaaaatgtaaaattgttgttggattgtgccattttatcgttctgcgctgtgatctggctgtaacaatactttttcaaaatgcattacggataacatctattactccgtgcaggatgggatcacgcaggctgaatttgttgtagtggatagagaaatctatttgctcctcatttaaggacggaaaaggcagtttttccagcggccagcagcggctaaacaggttataaaaacggctgggaataatcgctaacatgtcactgttggcaaccagtgcagcgattgtcaaaatgttgtagctggtgaaattgatttgccggtccggaaacatttcttgaactctctgccgcagaccgctgaaattttgctcttccggtaacagaagtacatgcgcagcgttgtcgatagtctctctgtcatcttctaaagagagtagtggatttccctcgcggcaaattaacaccatattgtcggtgaacagaacatgatgttgcaccgtacgattggtgcaaaacatgttatcgatgatgagatcggtttgaaactgactgagttggttttccgcgtcgctgatgggcgggttgcgcagtaaaagctgcggatagtgagttttaatcgcccgatagatgacaggaaggaccagtgctccgaccgagggagtggtcgcaatagttatcgttcgttgcttatcatagcttccttcgatatccagcgcgccaagaatggactcaaggccctgactgatatactcatgtagatgcatcgcaaatgcggtaggagtgacaccctggcctttgcgaataaacaatgggtcagggaatataacgcgcagtttctgaatagactgactgattgccgagggggtcagattaagcactttcgctgcattaacgatccctttatgtacatatacagcttcaaaaatagtcagaaggttaagatcaatatttcgtaaggttgtaaatatttgtggtttaccttctgacgactttctgcttaaacagggttcaatttgattattactatccacgcacttactccaattttattcatggaaaaataatatttaaaaaattacaataatcttatgtctaattggaacggaacgcttttgctcaccataatcaactatttcaataggttaatcaatggggtgagttacggagcaaggcgtggcaccgcatttctgcaagtgataaagaaaatatacaaacgcgaaggagatgtaaagcattagcagatattatgagtaatgacccagtgtaaattgggccattgatgtatggaattaagcggtaatatattcgaagtccggattgtttagtagcgctaaaatattttccagtaaacgtggagcaatattattagtcgtcgcttcgggtttccattgtgatattttagccatttccattccggcatacccacaaggattaatacgtaaaaatggtgaaagatccatattgacgtttaatgccagaccgtggaatgaacaaccgcgtcgaatacgtaaacccagtgagcaaattttcttttccccaacatagacacctggcgcgtcagcccgaggatgcgcttctatacccagttcagccagggtattcaccactgtttgctcaagcaaggtcaccagttcacgcacaccgagtttacggcgtttcaggttaagcaacacatacatcacctgttgccccggcccgtgataagtcacctgcccaccgcgatcgctctggatcaccggaatatcacccggcattaaaatgtgctccgcttttcctgcctgaccttgggtgaataccggatagtgctcgaccagccagatttcatcaagggtactatcatcgcgggtatcggtgaattcatgcatagcctgggagattggctcgtaaggctgaagaccgagctggcggacaagaattttatcctgatacaaaacggcatctccgtggagaatgagtaaaagtgggggaaaagtatatcacagcgaggagaggggagttacccgaccaggagccgggtaacggagaagcgagttacagaaccatgcggacaatatcgattttgcccagttcttcatacagtgtttcaacctgctcgatatgagtggcgttgatagtgatagataccgagtggtagttgcctttgctgcttggttttaccgttggggtgtagtcacctggcgcatggcgctgtaccacttcaaccacctgatcaaccagctcaggtaacgcctgccccataactttgtaagtaaaaggagtagggaattcaagcagttcgttaagtttggttttcatgtcagctccggcgtaacgtaattaaatagcaactcccgccagaaggcgggagttttttactgatgcttagtatatggggacggaaattacactttcaagtgtttaatttttaaccaaaccagtgatggaacattaatttaatgtaatcaatgattttgccgaagaagttaccttccgggatttcttgcaacacaaccagcgggcgttgctcgatcgttttgccatcaagctggaagttgatagttccgacgacctgattcttttgcagcggcgcatgcaattcactgctgttcagcacatagctggctttcagatctttcatgcgaccacgcggaatggtcaggtacacgtctttatcaacccctaacgaagcgcgatcagaatcaccaaaccaaaccggttcagaggcgaactctttacctactttcagtgggttaacggtttcaaagaaacggaagccccaggttagcagttttttactttcggcttcacggcctttaaaagtacgtccgcccattaccgcagaaatcaagcgcatctggccttcagtcgcagaagcaacaaggttgtaacctgctttgtcagtgtgtccggttttgatgccgtcgacattcaggctgttatcccataacaggccgttacggttcagctggcgaataccgttaaacgtaaattctttttctttatagatcgagtattcattcggtacgtcacggatcaatgcctggccgatcagcgccatatctcgcgcggagctgtactgaccatcagcatccagaccatgtaccgtctggaagtgggtatttttcaggcccagtgcgttaacgtagctgttcatcaagccaacaaaagcgtcctggctaccagcggcaaaatcggccatggcgacacaagcatcgttacccgattgcaggttaataccgcggatcagctgagaaaccggaacctgcatgcccggtttgaggaacatcagcgaagaacctttaaacaccgggttaccggtggcccatgcgtcgttgccgatagtgactaaatcagtttctttaaatttaccggctttcattgcctggccgataacgtaactggtcatcattttggtcaggctggcaggatcgcggcggacatctgcgttctgttcggcgagcactttgccggagttatagtcaatcaggatgtaggactccgcatcgatctgcggtacacccgggatcatagttttgatattcaggtcatcggcatgtgcagcagagataaaggctgtgcaaagagccgtggtgagcgccaggcgcttcatgatacgagcggaaaaaatggtattcatggtctgaactacgacatccgtgatggaattaaaaaagtgccctactatagcaaatgcactaccggcaggcatctgactttccgcgtgactttgttaacgtcatttacagaaattgacacatcagatgcctgctttacgctactgcgcggtagtaataaatgactgtaattgggcttcggtttgcaaacgttgctgcaaggtactggcttcggctttgctggcgaatgggccaagctggatccgccagaccgcgccattttgagttacgcgaccggggacgccgaacttctgtcccagttgctgttggtactgttgcgcacgagcctgatcgcttacggccccgacttgcaccataaagttgccgctggcgctttgcgagacggcttgcggtgtcaccattgcaggcgaggttgcaggcgttgtcgacggagctgtaacaacgggctgtggcgcaggcgtcggttcgctgccttccagtacaccaggcgctaaggtcgttggtgcgccgaggaaaccgctactggttaccggcgcgccggtcggatcttcgctttttagcgtcgaattactgaccggaagaatgtcaccctgcgggccagacactgaacttgttcccgcgccaccgcttaaatcgggaggtgcaggcagggcgtaagtctgtttggcgactgtggtacaagccataccaggaccagaaagcgaaccatcctgggcaacaataatcggatcgatacgaactttggtgttgtttgacgtgttaagacggtcagctgccgcgcgagaaagtgaaataacgcggtcgttgccgtaagggccgcgatcattaatgcgcaccacgatcattcgcccgttagccaggttagtgattctggcgtagctggggatcggaagcgttggatgggctgccgtcagctgtgtcggatcgaatgcttcgccagaggccgtcaggttactgccgggttcggcatcatagattgccgccagtcccgcctggctaaatcgagacggatcctgcacgattttgtagcttttaccgtcgcgctggtaatcctgatttgccgtcgcgttcagtggttcgaaacgcgggtccgccccgctaatttcaactatagggccgttacataccgcaggctgcggtacacttaccgtctgttgctgaccatcatcgcttgtacatgccgcgagcattcctgccgcgatgcagatcccgagccactgcttacgcattgcgcacctcttacacgcttttcgacaacattttcctgtgggtgtggattgacattacaatcccgaacccagccatcagcacaattagcgccgatcctccataactgaccagtgggagcggaacccctacaaccggcagaataccgcttaccataccaatatttacgaagacataaacgaataatatcagcattaagccgccagccatgacgcgaccaaaggtggtttgcgctctggcggctatccacagcccgcgcatgatcagcagaatgtagagagcgagcagaatcagaatgcccactaatcccagctcttccgccagtaccgcgaagataaagtcagtatggcgttcggggagaaattcaagctgtgactgagtgccgtgcagccagcctttgccgcgtaatccgccggagccaatagcaattttagactgaataatgtgatagcccgcgccgagtgggtctgattccgggtccaggagcatcattacgcgctggcgctggtaatcatgcatcaggaagaaccacagaatcggaatgaacgccgctaccagcactactgcgacgccaatcagacgccagctaaggccagagaggaacagtacaaacagaccggaaagcgcaacgaggattgatgttcccaggtcaggctgtgcagccaccagcagcgtgggcataaatatcagcaccagcgcgatgccagtgttcttcaacgatggcgggcaaacgtcgcggttgataaagcgcgcaaccatcagtggtacggctattttggcaatttccgacggctgaaaacgaacaataccgaggtccagccagcgttgagcacctttagagatggcaccgaaagcatctaccgccaccagcaaaataatacagatgatatagagatagggggcccagccttcataaacgcgtggaggaatttgcgccatcaccaccatgatgaccagacccatcgcgatttggccgattttacgctccatcatgccaatatcctgaccgctggcgctccagataaccagggcgctgtaaaccagcaatgccagtaagatcagcagcattgtgggatcgagatggactttatcccagaatgtttttttattcggattatccgtcatgattaatggtcctccgctgcggcaaccgctggattttccgcaggcagatcggtgttgttatcacccagcataatgtggtcgaggatctggcgcatcagtgtaccaaccgccggacccgcaccaccgttctccagaatcatggcgacagccacttgcggattgttgtatggcgcaaaggcggtcatcagtttgtggtcacgtaaacgctcggcaattttgtgcgcattataggtttcgttcgctttcagaccgaagacctgagcggtaccggatttcgccgcaattttgtacggtgcgctagcaaagtatttatgcgccgtaccgttagggcggttagcaacaccgtacataccgtctttcgccagctcccagtaaccggaatgaatatcgccgacgggcggttcatgcggctgtacccatggcacctgtttgccgtcttcggcggtgctcatcagcaaatgaggaaccttcacgataccgtcattaatcaggatcatcagtgccttactcatctggattggggtcgctgtccagtaaccctgaccgataccaaccggaatggtgtcaccctgataccacggttttttaaagcgtttctgtttccattcgcgggtaggcatgttgccggaacgttcttccgccaggtcgataccggtgtaatgaccataaccgaatttacccatccattcggagaggcgatcgatccccatatcgtaggccacctgatagaagaaggtatccgcagattcttccagcgatcttgtgacattcagacgcccgtggccccattttttccagtcacgataacgtttttccgaacctggcagttgccaccagcctgggtcaaacagcgtcgtattgcgcgtgatcaccccggcgctcaatgccgaaaccgccacatagggtttaactgtagacgcgggaggataaaccccctgtgtggcgcggttcaccagcggtgtattcggatcgttcaacaaggcggaataatctttgctggagataccgtcaacaaacaagtttgggtcataactaggcgtggaaaccagcgccagcaccccacctgtacgcggatcggtgactaccacagctgcgcggctacccgccagcagcgtttcaatatattgctggagtttgagatccagcgtcaggtaaatatcgtgtccggcttgcggtggtacttcttttaactggcgaataacacgcccacggttgttaacttcaacctcttcataaccggtctgaccgtgcagcacatcttcatagtaacgctcaatgcccagcttaccgatatcatgcgttgccgcatagttggccagtttgccgtcattattcaggcgttcgacgtctttatcgttgattttcgacacatagccgatgacgtgggtcaacgccgaaccgtaaggatagtaacgacgtttatagcctttaacttcgacacccggaaaacggtactgattgacggcaaagcgagctacttgtacttcggtcaggttagttttcaccggaatagaggtgaaacggtgtgaacgtgcgcgctcttttcggaatgcagcaatatcgtcatcggtcagatctaccacgctgcgcaaagcgtccagcgtttgctgcacgttatcgactttctccggcatcatttctatctggtagatagtgcggttgagggccagagggataccgttacgatcgtagataatgccgcggctgggcgcgataggcaccagcttaatgcggttttcattagagcgggtctggtagtcggtaaagcgaacaatttgcagattatacaggttggcgataagcacgccggtcagcagcaaaatccccaaaaaggcgaccagcgcccggcgcacaaacagcgcggactctgccgtatagtcgcgaaaagagttctgtagtttcatccgctgcgttttctactcaaagctcccttatcactcacggtgataaggatggttggtggtgatgctccacgcccggtacagactctctgcgaccagcacgcgaaccagcggatgggggagggtaagcgccgacagcgaccagctctgctcagccgccgctttacaggcaggcgacaacccttcaggcccgccaatcagtagactgacgtcgcgaccatccagcttccagcgttccagctcagcggctaactgcggcgtatcccagggcttgcctggaatatcgagggtgacaatgcggtttttgcctgcggccgccaacatctgctcaccctctttgtcgagtatgcgcttgatgtccgcattcttgccgcgttttccggccggaatttcaatcagctcgaagggcatatctttcggaaaacgacgcaggtactcggtaaaaccggtttgtacccagtccggcattttcgttcccacggcgacaagttgcagcttcacgcattaactccagagtttttccagttcatacaggcgacggctctcttcctgcatgacatggacaatcacatcgcccaaatccacgacaatccagtcggcgctgttttcaccttctacgccgagcggtaacaggcccgctgcgcgagactcctgcacaacgtggtcagcaatggacataacatgacggctggacgtacccgtacagatgatcatgcagtcggtgatgctggatttgccctgaacgtctaaggcgatgatgtcctgacctttgaggtcatcaattttgtcgataacaaaatcctggagtgctttaccctgcaagttttccccctgggtgaatcaaatagataaaaatggtctgtcagtatacctgaaccagaggcgatttcgggacaattgtcgccgaatcggctttcgaaagtgggctatcatcccaccccgcgccgcagattgcatcgccatttttgtaaaacaatttctacaaagtcgtgtctggcggaaaaagtctggctgcggagaatatcagcctgcccgggtctgtcaatggtcgttgcggcttacccgtaaaaaaacagaaaagtcatgcattctcgaccccgatggcacggctattgaggacgcgtagcgtcgcgaatttttggttgatatcaatggcgctccaacacccctggtcaacgcgaaaatgccacatagcttcggcaggcatgccaattaaacgggcgattaacagactcagtacaccctgatggctgacgactaaaatattctgatagtgctgaaattcactaagccttgcgataaagcgttccacacgttgcgaaaatgcctgaaatccttcaccgttcgtggggattgcatgctgccagtcattgcaccacgcgctatagttttcggcatcttcttgcatgaggtcgcgatgatgtcgcatctcccagtcgccaaaaaacatttcgttgagttcaggtatgatttgcacggggagctggcggtcactgagaaccagtcgcgcggtatgctgtgcccgttccagttcactgcataaaaccagatcaaaggaaacaccatgtagcagcgtatgcagattttgcgcttgctcaataccgcgcgcggtcaggggggtgggcgcatgaccgctgtaaagaccatcgatattcgcttgcgtttcaccatgacgaattaaccacagtcgcatcatgccctccgtaacgacaggtatcagcgatacaagccttgttggttaatgtaagtcagtaccggttccggcaataaatcctcacatgattcaccgttttgcaaacgttcgcggatgatggtcgccgagatgttaaaccacggcgtttcagccagataaattttaccggcaggctgaaggtgaagatcttccgggttatgtgtcaaatgatcttccagccattgctggtattgcggttgcgccatttcaagtgggtaacctggacgccgacagacgatcaaatgtgcattgtcgagtatcgtttcgtattcgtaccaggtcggaaaggtcagcagtgaatcctgaccaataataaacgccagcggcacgtccggtccttgttcctgccgccactctttcagtgtttgcgcagtgtaagagggggcattgcgctttagctcgcgttcatcaagagtaaataatggcttgtcggcaatcgccagttcaagcatgtgtttacgctgcacgctgttcgcttccggctggggacgatgcggaggaacattattagggatgattgtgacccgcgtcagaccaatcaaattcgccagcgtttccacgggttttagatgaccatagtgcaccggatcaaaggtgccgccaaacagagcctgtaaagatttcatatcaaccgtcgataaatacgtccgccaggggtttatggcacaacagaagagataacccttccagctctgcccacactgactgaccgtaatcttgtttgagggtgagttccgttcgtgtcaggagttgcacggcctgacgtaactgcgtctgacttaagcgatttaacgcctcgcccatcatgccccggcggttctgccatacccgatgcttatcaaacaacgcacgcagtggcgtatgggcagactggcgtttcaggttaaccagtaacaacagttcacgttgtaatgtgcgcaacaaaataaccggttcgctgccttccagacgcagttgctgaagaatatgcaatgcgcgcttactttttcccatcaacaaagcatcaacccaatgaaaaggggtgaaatgcgcggcatcattcaccgcctgttcaacgcgcggtaatgtcaatttgccgtctggccagagcagcgataaacgctccagtgcctgagccagcgccagcaggttaccttcataacagtagcagagcacctgatttgccgcgtcatccagttctaagttgagctgttttgcgcgcgcagcaacccagcggggaagctgagcctgctccggtgtctgacaggtcacctgcacgctgcgattcgcaagcgcagtaaaccaggcggcattttcttgcgctttgcttaatttattaccgcggacgatcaacagcaggtcgtcatgcagaagtccggtgagtgtgagaagttgctcattgatcgccgcattcggtccgttttctggtaacaacagcaatagcgtttgtcgactggcaaacagactcatagcctggcataacgaaaagatcgcattccagtcagtgttgggatcaatggaaaaagtgtggtgttcttcgaatccttgtgccgcagctacctgacgaacagcgtcctggctttcctgcaataacagaggatcgttaccaagtaaaagatacgccgcgcgcagcccttcattgagctgcgcgcggagttgttccgggtacaaccgaatcatcagttacccagcgtggtggagacgcgtgcaggcgttgccggagtatccgttgtggtcgacgtctgttcttcgtcggaacgaatatccgcagcacggatgcttggcagcttacgaatcagctgttcggcagcacggtcgtacatctcttttacgatcatgtcttgttcgttatctttcgctaacgccatttgcgggttatcgaagaacgaacggaagactttggcgctaatcgggtagatatcacggccggggatcaacacggtcgcattaaccgtcatgatcatctgatactctgctgtttgaccgttacggaataccgatgcggtatctttcgcgatgctcactttacccaaacgcaaggatggaacgtccttacgcgtggtttctttatcaagcaactcgacaccattcagacgtaactggttacgcaccgcacggcttaatggcccgttcggatcgcctgagtccaggatcatgaccttcatagtggaaggaacctgcgtggtatcacgcagatgccagccacacccggcggtgattaacaccgccagagataacaacaatgttgccagatatcgcacgcttcctcccgcgcttagccaacgaccagattgaggagtttacctggtacgtaaatcactttacgtacagtaacgccatcaagatattttgctaccagatgttcctggccagcacgttcgcgaacctgttcttccgttgcgtccaccggaacggtgattttggcacggactttaccgttaacctgcaccacgaccagcgtggagtcttccaccatcgctttttcgtcagcaaccggccacggcgcgttgtcgatatcgccttcgcctttcagttcctgccacagcgtgaagcagatgtgcggggtgaacgggttaagcatacggacaacggccagcagtgcttcctgcatcagagcgcgatcctgctcgccatcggttggtgctttcgccagtttgttcatcagctccataatcgccgcaattgcggtgttgaaggtctgacgacggccgatatcatcggtcactttagcgatcgttttatgcacatcgcgacgcagcgctttctgattttcagtcagcgcatcaacgttcagtgccgcaacatcaccttttgctgtgtgctcgtaaaccagtttccagacacgtttcaggaagcggttagccccttccacaccggattcctgccattcgagagtcatatcagccggagaagcaaacatcataaacagacgaacggtgtccgcgccgtaacgttcaaccatcacctgcgggtcgataccgttgttcttcgacttggacattttgctcatgccggtataaaccagttcatggcctgccgcatctttcgctttcacgatacggcctttctcgtcacgttcaacgatagcatcaaccggggaaacccagttacgttcgccgttttcgccaacatagtagaaggcatctgccagcaccataccctgacacagcaactgtttcgctggttcgtcagagttcaccatgcctgcatcacgcatcagtttgtggaagaagcggaagtagagcaggtgcataatggcgtgttcaataccaccaatgtagatatccaccggcagccagtagttagccgcttcggaatccagcataccttctttgtactgcgggcaagtgtagcgcgcatagtaccaggaggactccataaaggtgtcgaaagtgtcggtttcacgcagtgctggcataccgttaacggtagttttcgcccactccggatctgctttaatcgggctggtaatgccgtccattaccacatcttccggcaggatcaccggcagctggtcgtccggggtcggcattacggtaccgtcttccagcgtcaccatcggaatcggcgcgccccagtaacgctgacgggaaacaccccagtcgcgcaggcggtagttcactttacgctcgccaacgcccatcgcagtcagtttatcggcgatggcgttgaaggccgcttcatggtcaagaccgttgaactcgccagagttgaacagcacgcctttttcagtcagggcttgctgagaaagatctggctcagagccgtcagctgccaggataaccggtttgatgttcaggccgtatttagaggcaaactcgtagtcgcgctggtcgtgccccggtaccgccataactgcgcccgtgccgtactccatcaatacgaagtttgctgcccaaacgggaatttcttcgcccgttaatgggtgaaccgctttaaagccagtatcgacgccttttttctccatcgtcgccatttcagcttcggcaactttggtgttacggcattcgtcaataaaggccgccagttcaggattattttccgccgctttctgcgccagcggatgacccgcagctaccgccaggtaggtacaacccataaaggtgtccgggcgggtagtgtaaacggtcagcgtgttgtcatagtcgttaacgttgaaggtgatctccacgccttcggaacgaccgatccagttacgctgcatggttttaacggtgtctggccagtgatccagtttatccagatcgttgagcagctcgtcagcgtaagcagtgattttgataaaccactgcgggatctctttacgttcaactttggtatcgcagcgccagcagcagccgtcgataacttgttcgttcgccagtacggtctggtcgttcgggcaccagttgaccgcagaagtcttcttatataccaggccttttttatacagctcggtgaagaatttctgttcccaacggtagtattccggcgtacaggttgccagctcgcggctccagtcataaccaaagcccagcattttgagctggtttttcatatacgcgatgttgtcgtacgtccacggtgccggagcggtgttgtttttcaccgccgcgccttccgcaggcagaccaaacgcgtcccagccgatcggctgcaggacgtttttgcccagcatacgctggtagcgggcgatcacgtcaccgatggtgtagttacgtacgtggcccatgtgtagtcgaccagaaggatagggaagcatagacaggcagtaatacttctctttgctctcgtcttcggttacttcaaatgtgcgcttctcatcccaatgaagctgtactttggattctatctcttccgggcggtattgctcttgcatggcagccagtggtcctgttttcaatacggctacaaatgtagcgttgaggtggtttttcagatccgcatagcatagcccaaacgtccgcgtcaaaacagcctttcgcgcactcgacgttgaaatgatgcccggattattcatacattaatttacagagtttgtgggcgtattagcaaagcaaggaacaaagaacgtctattattatagtcagttaacgacccgggagatgaaacgatgaacaaggttgctcaatattaccgtgaactggttgcgtcactgagcgaacgcctgcgcaatggcgaacgtgatatcgacgcactggtggaacaggcgcgcgagcgcgtaataaaaacaggggagttaacgcgaaccgaggtcgatgagctgacgcgagctgtcagacgtgacctggaagagttcgccatgagctatgaagagagcctgaaagaagaatctgacagcgtctttatgcgggtgattaaagaaagcttgtggcaggagctggcagacatcaccgataaaacgcagcttgaatggcgcgaagttttccaggacctcaatcatcatggggtttatcacagcggagaagtggtcgggctgggaaatctggtctgcgagaaatgtcacttccatctcccgatctacacaccggaagtgctgacgctatgcccgaaatgtggtcatgaccagttccagagacgcccgtttgagccgtaatagtctgatttcgcacagcaataaagagaatatgggccgaatgaaattccccggcccttgtttttatctctacagtaaatcttcagtctcacgaatttcctgactgacatctctggttccggatgactgaactttacgatacaggtcgagagcctgtcggagatcgacaggtcttccttctccgtagtgatacataatggccaggttataccaggcagtggcgtcattgcattcagcggctttcgtaaaccattcaaaggcagcctgataatctttctcaacgccttgtccgtgtttatacatataaccgatgttgacgtaagcgccgacgctcccctgagcggcagccttcagataccagtacatcgcttgcttatagtcctggtccaccccttcgccagcgttataatcccatgcaatttgaaactgggcgtgccgattaccctgctgtgcgcttttcaaataccagaatgcggcgagtgtcttgttttgagcaacgccttttccgtcttcataaagatcggccagattgttttgcgcgtcactatggccttgtaatgcagcttgtttgtaccagaaaaatgccagcgcatagtcttttgcgactccgttgccatttctgtacatccacccaagattattttgcgcataagacattccgctctccgcggctatctgataccagacaaccgcttctttataattgggggcttctccacgatccagtgtccagccaagggcgttggaagcgaaagtatggccttgtagggcagcttttttcagccagaagatggcttgctcattatctttatgacggcttttatcctcggtatacttttgccctaaggaatactgtgcttcacaatgaccttgctcagcggccagcttcagccagtaaaaggctttttcgtcgtccggagaatcaattgcgctatcgcgattataataaaacccaacaatatattgagcctcgcaatcgcctttttcagcacgttcgataatctcatctattgataaattatcgcagcaacttgacgtgaaaatcattatcatttccttatggttgcagataaaacatattatatttttatgtgttccatttttgcgtaagccttattttatgcgtattatgtcgcgtcagaaaagtataaataaacgagcctcgcaatgcggctaatattcatttaatgaatatttaaggataaattatatggacatggagtcgcaaaaaatattgtttgcactttccactccgatggaaatacgcaatgaatgctgtttaccttcgcattcatcacccaaaatgtatttaggtacatgcttttttgacctttcttcctcatggggaattgatgaccgtgatgacctgctgcgcacaattcaccgaatgatcgataacggtcatgccgctcggttggcagggttttatcaccgctggtttcgttattcgccatgtgaatggcgtgactatcttgctgaactaaatgagcaaggtcaggcttatgcgcaatttgtcgccagcaccgccgaatgctgtggcgaagggggaatcaaagcctgggattatgtccggatgggttttttaagccgaatgggcgtacttaataactggttgagcgaagaagaaagtctatggatccagtcgcgcattcatctacgggctctacgttattatagtaactggcggcaatactttgccggttatacctttggtcggcaatattggcagtctcccgaagatgatcatctgcctttattacgcgaattcttagcgcgtaaagaatacgacgattccggcaatgatatgttttatcaattatttgccagtgatgatgcgtattaccctaccttgtcctggcaaccattggcttactattctgcatgcccggaaacgcttaaggatatgagcgacctatgaaaaattgctggaagatcctcgatatagaggaaacgactgacgtcgatattatccgccgcgcttatctggcgctgttaccgtcctttcatccagaaaccgatccgcagggttttaaacaacttcgtcaggcgtatgaggaggcgctacggattgcgcagtcgcctgctaaatctgtttggcaaccagaagaatatgaggtagcagaacatgaaattctgctcgcctttcgtgcgttacttgcctctgatagtgaacgttttctgccctccgcctggcagcgattcattcagcaattaaattattgctcgatggaggagattgatgaattacgctggtcgctgtgcacaatcgccatgaacactgcccatttatccttcgagtgcgtggtgttattagcagaaagattgcggtggttacaggaggaaaataccggggaaatagacgaagaagaactggaatcctttttatatgccattgcgaaggggaatgtttttaacttccagaccattctgcatctgcccgttgccgtgcaaaatgacaccatcgatttttaccaaatgttcgctcggatttggtcatcgcatccacaatggctgacattgtatttagcgcaacatcgcgcagtgattatccccgatgatgcaaaactgcacagaaatttactccgctggtatagcgcaggtcgcctggatatccccgaacttctggattacgcccagtcatggcgggaaactgaacctgataatgaagatgcgccttattatgaatacgcgcaacgcgtctattgtggagaaggcgaaagcctgttggcagaactttgtgactactggcgcgagtatccctccacccaggcggatgctttaatgttgcaatggtgccgtcagcatcgggtcgattattacccattactggtgatgatgattgaagcgcgtgatctggttaacgatcagggaaaaccgctactttatgtccccggcgacagcgcccgtacgcgttttcatttatacgaaatactcagcgatgaaaaactctctgcgctggggcgttcactggtcgagatggttttgcacaaaggacgtaagccgcggatctcactcacgcgtgatacagaacataccttatggccattatatctagttgccaaacaattagtgcaggcctgccaacctacagaagaatcattaatgccgattgtgagccgccttgatgcagaaaatcgttgtccactggaagcattaattattcgtcgattattaattcaggcggcgaattttaccgagaagcaaactgttgaaccggagccgcaaccgcagccaatgcccgttgacgatggtgggccaggctgtctgggcatcattaaaattattttctatatttttatctttgctggtttgatagggaaaatactccatctgttcgggtgacagtcgacgttaatgtgcgggaagcccggcaagtaatctttccgcatttttgtaatgttgtttggcggtcagttttaaccatttttgagattcataatggttaacattaatacctgagccatttctgtagatcaaacctaaagtatattgagcatgagcatacccttgttcagctgcttccttataccagagaattgctttacgggtgtcgggtttgacccccagacctttgaggtagatccaccccagtttactttgcgcgcgtggattttcctgttccgctgattgctcataccagtatctcgcctgtgtataatccagtggtttaccgtcgctaccatgaagataaaattctccaaggcgatattgcgacgttgagtgaccatgaatcgcggaaagctccgtggctgccgtggtgaatggaagactgcccggtgagcttaaataatcaaaggcataattcaccatggctttatcacgcaacgtcgttttcttgggttggctaatacaggtaattgctgcaactataaaaattgcgaatatatacattaattttttattcatgtgtgaatgcttcgattttctttttattttgaaagcgtcaagtttatactcatcaataataaaaaagtagtcagttaatgcacttaagggattattaacaaatgaataaggaagaacaatatcttctttttgcgctttctgcgcccatggaaatacttaatcagggttgcaaacccgcgcatgactcgccaaaaatgtatactgggataaaagaattcgagctctcatcatcctggggaataaataatcgtgatgatttaattcagactatttatcagatgactgatgatggtcatgccaatgatttagctggcttatatctgacatggcatcgctcttcccctgaagagtggaaagcattaattgctggtggctcggagagagggttgatttatacccaattcgttgcccaaaccgctatgtgctgtggggaagggggaatcaaagcctgggattatgttcgaatggggtttctgtcacgggtcggtgtgctcaacaagtggctgacggaagaagagagtttatggctgcaatcgcgcgtctatgtacgagctcaccattactatcacagctggatgcactatttttccgcctattcgttaggacgtctctactggcaatcttctcagtgcgaagacaacacttcgctacgcgaggcgctaaccctgtacaaatacgatagcgccgggagtcgtatgttcgaagagctggcagcgggaagcgatcgtttctatgccacgcttccctggcagccattaactgtccagtctgaatgcccggtaacgcttaaggatgtgagcgacctatgaaaacatgttggcaaatcctcgaaattgaaagcacgacgcaaatagacattatccgccaggcttatcttgctcgcttaccgttgtgtcatcccgaaaccgatccgcaagggtttaaagcattacgccaggcctatgaagaggccctgcgactggcggtaaatcctgtcgaggaagcagatgatgaagaaaaagatgctgccgctgaacatgaaatactacgtgcattcaggacattactggattcagaaagtgatcgttttcagccttccgcctggcagaaatttattcagcaattaaatacctggaacatggaggatgtcgatcaattacgctggccgctgtgtgcaatcgccatagaagcgcgatatctttcattaaattgtgcttctttgctggcagagcgtttgaactggcattcatttaatgacagcgaaggaatggatgaggaagaaagggaggcttttcttgaggccattcaggctggtgattgtttcgatttccttagccttctggaatatcccattgcgttgcagaaccagactgttgagtattacttcgcgctggaacgttgctgccgttaccatcctgactatgtcactgcgtttttggcgatggaaggtccgtggttaattcctgatgatgcaaagttacatcgcaaactgttgcgctggtacagctcggtgcaaacaggtatggcggaactcattcctgtcgctcaacagtggcaaacggaagaaccagaaagcgaagatgcccggtattacttgtgtgcacaacgtttgtactgcggcgagggggaaagcctgcttgccgatctctgcgcgtactgggaaagttacccatctacacaagctgataatttgttgttgcagtggagcaagcgtcattgcccggattatttcgcgttattagtgatggttatcgaagcgcggagcatggtagatgcgcaaggtcaaccgctgaaatatgttcctggtgagagcgcccggacgcggctgttatgggcggagattttacatagcggaaaattatcgccgttaggtcaatcgtttattgagtcgttattcttcaagcgcaaagcatgggcgtggtggaaatcgagagtcggtagcgagacagagcaagattcaccgttcctggatttgtatcgggtagcggaacaggtagtacttgaagcgtttccgaaacaagagatgctggcccgtcttaatacaaggctggaaggcggagatgctcatccattagaggccattgtcacccggatgcttttgacgaaagtgaaactcgagccggaggatgaagatgtcgatgagccaacacctgaaaatcatgaagaaaaaaatgatgagggtgaaaaaccacagagcattaccagcattatcaaaatcagtttaacggtgctggtgataggttatgctctcggcaaaatcgcgatgttgtttagctgacgatgtgttttttgcgccgatgccggatgcagcgtttacgccgcatccggcagccgtgtttatgggatctcaatggctaaataatcgctcgcccgccgccgaacttcatccacgcgggccatatcgtttgactgcaacgccgcatcaaaatcggtgatcacccggccgatctcttctcgctcgtcacccagcgcccgcgcccacaactcttccagtttggctttaaaggtgcgattgatgagcatatcgcgcggataaattttcaatgcggataaccgcgtccgactctcttcaatctgctgcgcgctcaatgttaccgggctgtggttaatcactctggacttaacgctgccgtcttccagaagcacgtcaacttcaagcaacccgttgatatcataactaaagcgaatatcaatcgactgataagccccggttttcttcaacggcacatcgaaggattccaccagaatgttgtttttaactttgtggttttctccctgatagacgttaaccgtaattgaatcctgttccgggtgcatggttgaataagtttctacacgcgacacgggcacagtggtgtttcgttcaataatcggcgagaaaatgccggaaacgccctggcggttaacttcaacgcccaacgagtaagggcaaatatcagtgaggattacctcttcaatatcttcactgcgtaagcggcaggcggcctggattgctgcgcccagcgcgacaatggtgctcggatcgtaactttgatacggtaatttgccaaacagacgcacggcgattcgctgcaccagcggcatttgtgacgcgccgccaaccagcaccagactgtcgatttgactcggcttcagacgcgcatcgcgcaacgcctgttcaatcggcactcgcaagcgattgagcagcggcaaccacaaatcttccagttcgttctcgtaaaattcgcattcccgcgtttcttcctgatactgccagcgaatgtgcaatggcgattgattgctacattttgccgcttccacacaggcgtacaaggctgccagttcactctcgttaagcgtggtcctggcgacatccgcgcgttttaaaacctcatcgaccagcatatgggtaaaatcttcgccaccaagaaagttgtcgccagcggaggcgtgaacttcaatcaccggcgtggcgtactcaagcaccgtaacgtcaaacgtgccgccaccgagatcaaacaccagcgaacgggtattttgttgggtatgcaggccatacgccatcgcagctgctgtgggttcattaattaagcgtaccgcatttaacccggctaactccgctgctaaacgggtatgcttgcgttgttcatcgctgaaataagccggaacggagatcaccacatctttaatcggacgttgcagaaattcttcggcatcttcttttaatgagcgtaataccaaagaggacagttctggcgcgttaaatgtgtcgctgcctaaccgccagttggtattactgcccattgcacgtttaaataacgctgccgttttatccggatgcgaagtacgccgtgatacagccggttttccgactaaaatatgattattttcatccatgctaattatggatggtgttaaatattcaccgaacttatttggaattaattgcgcggcaccgtctttccagacggcaattaaactattggtagtaccgagatcgataccaatggcgagttctgcattatccattgcatttatatcttgaaagaaaaagagataaacagattaagaccacccaggtaacgcgtggtgatcttaatcaatgacgtgtgttaagcgtaaaatttcagacgatcagccagtaaatcaacaaagccctgacgatcaacatcgaccattacggtggcattcggtttattgcctgtcagataataataatcaacaaccgtcataccctgggtatatttcccctgtgtttccacgccaacccagcgctcaacagaggtaaataactccggtttcaacagccaggcgatggtgcatgggtcatgcagtggtgcgccgacaaagccccatttttcgtctttatgatattcgaggaagaaatccagcagttcggcaacaatggttgaaacagggttaccaatcgcgcggaaacgctcggtgtcttcaacgtggatttgtgctttatgagtaacatccagaccggccatcaccaccgggatccctgactggaagacaatttctgccgcttccgggtcaacgtaaatattaaattcagccgcaggcgtccagttacccagccccatagcgccacccataatcacgatacgggcaattttgctatgcagttccggatggctattgagcagcaaggcaacgttagtttgcggtccggtagacacaatggtgacaggttccgcactttcacgcagcgttttcgccatcagctctaccgccgtacagttttgcggtgcgaatgtcggttccggtaatgccgggccgtcgagaccgctttcgccgtgcacattgtccgcgataatcaactcacgcattaacggttttaccgcgccgcctgctaccggaatatcggtgcgattaagcaaggtcagcatacgcagaacattgcgtaaggttttttctggtgtctggtttccggcggaagacgtaattgctttgacatcaagctctggtgaggcgagggcgagaactattgcgatagcgtcgtcatgacctgggtcgcaatctaacagaattggcagtgccattgttgctccttgttgtgtgcttctttgcgacaagggtaacgccaggatgtaacagatacgaggggcgaaacgataaagcgtgagatggcgcgcaattgggtatgcgcgccagagtgattaatgcaggattttcgcgaggaagtcttttgcgcggtccgatttcggatcatcgaagaaagcgtctttcggcgagtcttcgacaattttaccctcgtccataaagatcacccgattcgccactttacgggcaaagcccatttcgtgggtcaccaccatcatggtcattccttcgttcgccagttccaccatcacgtccagtacttcgttgatcatctccggatccagcgccgatgtcggttcgtcaaacagcatcgcaataggatccatacacaacgcgcgagcgattgccacacgctgctgctgaccgccggaaagctgcgccggaaacttattggcgtgagcagaaagcccgacacgctccagcagtttcagggctttttcacgagccggcgctttatcgcgtttaagcactttcacctgcgccagggtcaggttttcgataatcgacagatgagggaacagctcgaaatgctggaataccatcccgacgcgggaacgcagctttgccagatcggttttcttgtcgttaaccacgataccatcgacggtgatttcaccttgctgcaccggttcgaggccgttgacggttttaatcagcgttgatttgccggaaccagacgggccgcaaaccaccaccacttcgccttttttcacttcggttgagcagtcggtcagcacctgaaagtgaccataccattttgaaacatttttcagggtaatcattatgctgtccttcttttcaagtagctgaccaacaacgacgcgctaagactaataacgaaataaacaaatccggcaaacaggatcatctcaacctgcgtaccatcacgctcaccaatggttgaggcggtacggaagaaatcggccagggataacacatacaccagtgaggtatcctggaacagtacgatgccctgagtgagcagcagcggcaccatcgcgcggaacgcctgcggcagaataatcagtttcatcgactgccagtgagtcattcccaacgccagcgcggcgctcgattgaccacgagaaatactttgaataccagcacggataatctctgaatagtaggccgcttcaaacatcgaaaacgccaccatcgccgaaattaaacggatatcattttttggcgataatcccagcacgttttgcagaaaacccggcacgatcaggtaaaaccacagcaaaaccataactaaaggaatcgagcggaatacgttaacgtaggctttggcaaaccacgccacgggcgcaaagctggataaacgcatcaccgccagcatcgtgccccacaaaataccaatcactaccgccgtgacggtgattttcagggtgatcaccagcccgtcgagcagatatggcagggaagggacaatggaactccagtcaaactcgtacattatttgccccccatgttgccaggcaggcgaactttacgttcaaccagcgtcatcaccagcatgataaaagcgttaatcaacacatacgccagcgtaatggcggtaaacgactcccaggcatgggctgagtaatcgagcaatttacccgcctgcgccgccatatccaccagaccgatagtcgaggcgatggcggagtttttcaccaggttcatcatctctgaggtcatcggcgggacgataacgcgataagcattaggcagcagtacgtatcgataagcctgcggtagcgtcaggcccatcgccagcgcggcatttttttgccctcgcggcagcgactgaatcgcggcgcgtacctgttcgcaaacacgggcggcggtaaacagccccaggcagagcatggatgaaaggaaaaactgaatattgggatccagctcggccttaaaccacatgccgattttctccggcagcagctccgggatcaccagataccaggtaaagaattgcacaatcaacggcacgttgcggaacagttcgacatacaacgtacccagaccagagagaaaacggtttggaacggtacgtaaaatgccgaaaaatgaaccgacgaggaaagcgataatccaggcgcagatcgacaaagcgatcgtcacctgaaaaccactccagatccaaccaagataggtggtgttgccgaacggggcttgttgtaaaaaaataccccagttccagtctatagacataaatctactccagaaaaaagagggtagcagcgttaactgctaccctcgaagattgttacccagcgtattgcggttttcaggcccgatggggaacgaccatcaggcgtatagtctgtccgtgctacgtaacaatcgagagggctggaatttccgcccctggttcttgtaattagttcagtgccttgtcattcggttctttgaacagtgctttcatttcgtctgacagttcgaaattcatgttcaggtttttcggcggaattggatttttgaaccacttatcaaaccatttttccgcttcaccggaggtctgcacctgagcgatggtgtcatccatcagctttttgaactgcggatcatctttacgcaacatacaaccgtaggcctcctgagactgcggcttgccgacgatttcccagttgtctggtttcttcgctttcgcacgttcaccggccagcagagcgtcatccatcataaaggcaacggcacgaccgctttccagggtgcggaaagagtcaccgtgatctttggcgctgatgatgcgcatattcattttttgctcttcattcagtttgttgagcaaaacttcagaggtagtgccggaagtgacgactacggctttgtctttcaggttggcaaaatctttgatatcgccaccctttttggtcaacaggcgcgtaccgaccacgaaaatagtgtcagagaaagccgcctgtttttggcgttcgacgttgttggtggtagaaccacattcaaaatcgaaagtgccgttttgcagcagtggaatacggttttgtgaggtaatcggaatcagttttacctgcaagtccggtttgttgagtttctttttcactgcttcaacaatggcgttggagtaatcctgcgagtaacccaccactttttgctgattgtcgtaataagagaaaggcactgaagattcacggtgaccgacgacaatcacaccgtttttggcgattttgtccagagtactgcccgctgccggggcggcgtcatctgcctgtgccagtcctgcggaaagcgccagggcgaggattgctgtggcaggtttacgtaattgcatatccaactcctttatcttctgcgttaagaacgcatggatacccgttgtgagtgtttgtgttgttatcgtctgcaactttattgtgcagtgttgtgcctgttagggaaggtgcgaataagcggggaaattcttctcggctgactcagtcatttcatttcttcatgtttgagccgattttttctcccgtaaatgccttgaatcagcctatttagaccgtttcttcgccatttaaggcgttatccccagtttttagtgagatctctcccactgacgtatcatttggtccgcccgaaacaggttggccagcgtgaataacatcgccagttggttatcgtttttcagcaaccccttgtatctggctttcacgaagccgaactgtcgcttgatgatgcgaaatgggtgctccaccctggcccggatgctggctttcatgtattcgatgttgatggccgttttgttcttgcgtggatgctgtttcaaggttcttaccttgccggggcgctcggcgatcagccagtccacatccacctcggccagctcctcgcgctgtggcgccccttggtagccggcatcggctgagacaaattgctcctctccatgcagcagattacccagctgattgaggtcatgctcgttggccgcggtggtgaccaggctgtgggtcaggccactcttggcatcgacaccaatgtgggccttcatgccaaagtgccactgattgcctttcttggtctgatgcatctccggatcgcgttgctgctctttgttcttggtcgagctgggtgcctcaatgatggtggcatcgaccaaggtgccttgagtcatcatgacgcctgcttcggccagccagcgattgatggtcttgaacaattggcgggccagttgatgctgctccagcaggtggcggaaattcatgatggtggtgcggtccggcaaggcgctatccagggataaccgggcaaacagacgcatggaggcgatttcgtacagagcatcttccatcgcgccatcgctcaggttgtaccaatgctgcatgcagtgaatgcgtagcatggtttccagcggataaggtcgccggccattaccagccttggggtaaaacggctcgatgacttccaccatgttttgccatggcagaatctgctccatgcgggacaagaaaatctcttttctggtctgacggcgcttactgctgaattcactgtcggcgaaggtaagttgatgactcatgatgaaccctgttctatggctccagatgacaaacatgatctcatatcagggacttgttcgcaccttccttaggtaacatttagtttggctaaatgtaaagatattgctgttttattgtttgtttttgcgagatgcgccgcaccattccgaagcaaaattcttaaaatgcactcttttagtgctaccgctggattactgtggtgcaactaggttgtactgatgctgtttcagggtttgccttgtataacaaagcaatagatgtgccaaagttggataggagaatattgttatccggataatgcactgatgccgcatccggtgagcgtgccgaaatatgggatgtattccggcacgataagaagggattatttacgtcgctgacgcagactcatcaacacagcagcaaaaccaaacaatgccgtcagcacccacagcggccagttgccggtacgtgcgtatggtgtgagtccggtggtcggcgtcacgttagtggttaacacctcgcgggtgaactgcgggatcatcgcctgaatctcaccctgcgggccaatcaccgccgtaatgccgttgttggtgctgcgcaacagtgggcgcgccagctccagcgcacgcattcgcgccatctggaagtgttgccatggaccaatagatttaccaaaccacgcatcgttggagatagtcagcagatagtcggtatccgggcggaagttatcgcgcacttgctcgccgagaatgatctcgtagcaaatagccgcagtaagctcaataccatttgccgacagcggcggctggatatatggcccacggctgaacgacgacatcggcagatcaaagaacggtgctaacggacgcagaatcgactccagcgggacaaactcgccaaacggcaccagatggtttttgttatagcgatcggctgattcgtagctgtacggcgcacctttacccagcgtgatgatggtgttgtaggtatcgtagcggttctgcttattgagacgcgcgtcgacaatcccggttaccagcgagctacctttatcacgcaactcaccgtccagtgctttgaggaacggttgctgattaatttccagatcggttatcgccgactccggccagataatcaacgatgatttgcccatcagcggtgccgttgcgttgtagtaaatcttcagcgtattaagaagctggccttcgtcccatttcagcgattgcggaatatcgccctgaaccatcgaaacctgaatggttttctccggttgtggggtaaaccactggatgtaacgcagcgggaagggaagggcaaacagcacgacggccaccaccagcggacgccagttgcgtttgaccaacgccagtgccagcaggccactaaccatcatcagcaggaagttaatggcttccacgcccattatcggtgccagcccttttaacgggccatcaatctggctatagccgaactgtaaccacgggaagccggtcagtacccaaccgcgcagaaactcggtcacttgccagagggcaggggcggcaatcgctacgcgcagccaggtggttttcggccacagacgcgacagcacgccagcaaacagtccggtatacagcgacaaatacgccgccagcagcaccaccaggaagatgttaaccgggccaggcattccgccaaaggtcgcgatgctgacatagacccagttaataccgctgccaaagaggccaaatccccagcaaaagccaatagcggcagactggagtggacggcggttaaaggtcaacgcctgaagccccatcagcgaaataatcgccgcaggccagacgtcgtaaggagagaaggccagcgttccgcaggcaccgaataataacgccagcagcaggcgaatgcgctggcgttcaattaatgaggcaaaagccatgtagttatctatccagtttcggttttattcatccagcttcggctggggtgagtcatccgggattttgacatgaacctgaataatacgccgactgtcggccatcgccactttgaactggtaaccgtcgatgtcgatagtttcgccacgcgccggaagatgcccaaatgcctgcatcaccagaccaccgatagtgtcgacttcttcatcgctaaagtgggtgccgaacgcttcgttgaagtcttcaatggaagccagtgcgcgtacggtccaggtatgacgactcagctgacggaagtcgatatcatcttcttcgtcatactcgtcttcaatctcaccaacaatcagttccaggatgtcttcaatggtcaccagaccggaaaccccaccgaattcgtcaataacgatcgccatgtggtaacgctgagagcgaaactctttcagcatccggtctacgcgcttactttcaggaacgacaaccgcctgacgtaacactttgtccatgctgaaggcttcagcatcgctgcgcataaacggcagcaagtctttcgccatcagaatcccttcaatgtgatctttgtcttcgctaatcaccgggaaacgtgagtgggcggactcgatgatgacatcaagacattcgtccagcgtctggttgcgtttcagggtaatcatctgggagcgggggatcatgatgtcgcgaacgcgttggtctgcgatgtccatcaccccttcgagcatatcgcgcgtatcttcgtcgataaggtcgttctgcccggaatcacggatcagcgccagcagttcgtcacggtttttcggttcaccgtggaaaagttggctgagtaacagggagaaaaatcccttcttgttgcttatcgtgtcactactgtgtgaattgtcgtcgctcatggcgtcgtatgggttctcatgttagttaatcaaaacgccgtcgttaatcaccaacggcggggacgtctgccagtcaaatgcctggcaaattattctttctcggcaatgtacggatcctcatagcccagagcaagcataatctctgtttcgagggcttccatttcttctgcttcgtcatcttcgatgtgatcgtaacctaacaaatgcagactgccgtgcaccaccatatgcgcccagtgcgcctccagtggtttgccttgctcctgagcttccttctcaaccacctgacggcagataaccagatcgcccagtagcgacatttccatgccaggcggcacttcaaacgggaaggagagcacgttggtcggcttatccttaccgcgataggtcagattcagactgtggctttcggcggtatcgaccacgcgaatcgtcacttccgattcttcctgaaactgcgggatcaccgcattcagccatgtctgaaactggctctcttccggtaacccggaattatcttcacatgccagttgtaaatcgaggatcacctgactcatttttgttcctgttcttcgcgcttgcgttctgctgccagcgccgcttttcgtttttgttcggcttcttcccaggcttcataggcgttaacgatacgcgccaccacagggtgacgaaccacgtcttcgctgtggaagaagttaaagctgatctcttcgacatcggccagcacttcgatggcgtgacgtaagcctgatttagtattacgcggcaggtcgatctgtgtgacgtcgccggtgataaccgcttttgagttaaaaccgatacgggtcaggaacatcttcatctgttcgatggtggtgttctggctctcatcgagaatgataaacgcgtcgttcagcgtacgaccacgcatataggccagcggtgcgacttcaataacgttgcgctcaatcagtttctcgactttctcaaagcccagcatttcaaacagcgcgtcgtacagcgggcgcagatacgggtctactttctggcttaaatcgccaggcaggaagcccagtttctcaccggcttctactgccggacgagtcagcagaatacggcgaatttcctgacgctccagggcatcaactgccgcagccactgccaggtaggttttacccgtacccgccgggccaacgccgaaggtaatgtcatggtcgagaatattggcgatgtactgcgcctggtttggcgtgcgcggcttaattacgccgcgtttggttttgatattgaccgctttgccgtactccggcacgctctccgcgctttgctccagtacccgcgcttctttaatcgcaaggtggatctgttccggttcgatatcctgaatctgaccgcgcatcggggcagtatcgacatacaggctacgcagaatgtctgccgcagcggtgacgcaaatcggacggccggtcagtttaaagtggttatcgcggcgattgatctcgatgccgagacggcgttcgagctgcttgatgttgtcatcaaacgggccgcacaggctcaacagacgcgcattgtctgctggctccagggtgatttcgcgagtgtctatgttcaaaccgttcctcttatctgtatgccgccggaagctgaacattcaccggcctataaggaaattattcacgccacaggaaaaaggcgcaagcattgcaataaagatggggataaagagagaaaaaacaaggcccaccggaacggcaggcctgagaattacggctgataataacccacgccaaggtcgttttctttgcgggtacgggcaatcactgattccggtgtttctgccacgcgcagacccatttcatcttcagtacgcaccactttaccgcgcagagagttcgggtagacgtcggtaatttctacatcgacgaatttaccgatcatatccggcgtgccttcgaagttgaccacgcggttattttccgtacgcccggaaagctccatgatgctcttacgcgatgtaccttctaccagaatacgctgggtggtgccgagcatccggcggctccacgccatcgcttgctgattaatgcgctcttgcagaatatacagacgctgcttcttctcttcttccggaacatcatcaaccatatcggcggctggtgtacccggacgtgcagagaagataaagctgtagctcatgtcgaaattgacgtcggcaatcagcttcatcgttttctcgaagtcttcggtggtttcgccagggaagccaacgatgaaatcagaactgatctgaatatctggacgcgccgcacgcagtttacggatgatcgctttgtactccagcgccgtatgggtacggcccatcaggttcagaatgcgatcggaaccgctctgtaccggcagatgcaggaagctcaccagctccggcgtgtcgcgatacacttcgatgatatcgtcggtgaattcgatcggatggctggtggtaaagcgaatacgatcgatcccgtcgatcgcagcaaccagacgcagcagatcggcaaacgatccggtggtgccgtcgtagttttcaccacgccaggcgttcacgttctgaccgagcaggttgacttcacgcacgccctgagccgcaagctgggcaatctcaaacagaatatcgtcggacggacggcttacctcttcaccacgggtgtaaggcaccacgcagtaggtgcaatatttattgcagccttccatgatggagacaaacgcggtcggcccttcggcgcgcggttccggtagacggtcaaacttctcgatttccgggaagctgatatctacaaccgggctgcggtcgccacgcacggagttgatcatctccggcagacggtgcagcgtttgcggcccaaaaataatatcgacatagtgggcgcgctggcgaatgtgctcgccttcttgcgatgccacgcagccaccgacgccgataatcaggtctggattcttctcttttaacagtttccagcgacccaactgatggaagactttttcctgagccttctcgcggattgagcaggtgttcagcagcagcacatccgcttcttccgccacgtcggtcagttgatagccgtgggtggcatccagcagatcggccatcttcgatgaatcgtactcgttcatctgacagccccaggttttaatatggagttttttggtcatcgacttgctcttgcgaaatagtagccaggaatgcagggcgcatagtgtaatgctttgctgccgttgtgaccagtatgagcgttatcagcccttaggggtaaaaatcctgtaaacttaaagcatattgctaacaggatgattgaccatgacaaatcaaccaacggaaattgccattgtcggcggaggaatggtcggcggcgcactggcgctggggctggcacagcacggatttgcggtaacggtgatcgagcacgcagaaccagcgccgtttgtcgctgatagccaaccggacgtgcggatctcggcgatcagcgcggcttcggtatcattgcttaaagggttaggggtctgggatgcagtacaggctatgcgttgccatccttaccgcagactggaaacgtgggagtgggaaacggcgcatgtggtgtttgacgccgctgaacttaagctaccgctgcttggctatatggtggaaaacactgtcctgcaacaggcgttgtggcaggcgctggaagcgcatccgaaagtaacgttacgtgtgccaggctcgctgattgcgctgcatcgccatgatgatcttcaggagctggagctgaaaggcggtgaagtgattcgcgcgaagctggtgattggtgccgacggcgcaaattcgcaggtgcggcagatggcgggaattggcgttcatgcatggcagtatgcgcagtcgtgcatgttgattagcgtccagtgcgagaacgatcccggcgacagcacctggcagcaatttactccggacggaccgcgtgcgtttctgccgttgtttgataactgggcatcgctggtgtggtatgactctccggcgcgtattcgccagttgcagaatatgaatatggcacagctccaggcggaaatcgcgaagcatttcccgtcgcgtctgggttacgttacaccgcttgccgctggtgcgtttccgctgacgcgtcgccatgcgttgcagtacgtgcagccagggcttgcgctggtgggcgatgccgcgcataccatccatccgctggcggggcagggagtgaatcttggttatcgtgatgtcgatgccctgattgatgttctggtcaacgcccgcagctacggcgaagcgtgggccagttatcctgtcctcaagcgttaccagatgcggcgcatggcggataacttcattatgcaaagcggtatggatctgttttatgccggattcagcaataatctgccaccactgcgttttatgcgtaatctcgggttaatggcggcggagcgtgctggcgtgttgaaacgtcaggcgctgaaatatgcgttagggttgtagccttacaacattgccggatgcgtgccaaccgtaggtcggataagacgcggcagcgtcgcatccgacattgaaggataagacgtgtcaacatcgcattcgacattgaatgaacgcagaaaagcaaaaagctcgccgaagcgagcttttttaatgtggctggggtacgaggattcgaacctcggaatgccggaatcagaatccggtgccttaccgcttggcgataccccaactgggtgcacttacaaggtaagcgtcttgaataaattggctggggtacgaggattcgaacctcggaatgccggaatcagaatccggtgccttaccgcttggcgataccccaacaaattggttttgaatttgccgaacatattcgatacattcagaatttggtggctacgacgggattcgaacctgtgaccccatcattatgagtgatgtgctctaaccaactgagctacgtagccagattgtttcttcgatggctggggtacctggattcgaaccagggaatgccggtatcaaaaaccggtgccttaccgcttggcgataccccaataaccgggcggtgaaccgcttactcgaagaagatggctggggtacctggattcgaaccagggaatgccggtatcaaaaaccggtgccttaccgcttggcgataccccatccgtacaacgctttctggtgaatggtgcgggaggcgagacttgaactcgcacaccttgcggcgccagaacctaaatctggtgcgtctaccaatttcgccactcccgcaaaaaaagatggtggctacgacgggattcgaacctgtgaccccatcattatgagtgatgtgctctaaccaactgagctacgtagccatcttttttttcgcgataccttatcggcgttgcggggcgcattatgcgtatagagccttgcagcgtcaacctctttttcaaggaaaattgctcgaaagtgactgtttggttaggttgcgaacagcgtggcgctatattcgtcaattattgtttactttgtgttttttcccaccctacagccattcttttgtcatacaggatgaaattcggaatttaacaatagtggtgggaaattaatctatgaaatactggcctacagtgatgagttgtcaaacagtgatgtggcaaacccggaacatttccttactgcatatcagaatcaacaagcacctcaataactgaaacagccccggatttcaccggggctgtttcgcatttcttacttatacgccgactggtgaacaccaaccgcgcgaccagacggatcgtccattttcttgaacgcttcatcccattcgatcgctttagcggaagaacaagcgacggaaggaccgcccggcacgcactcagcggcgctcggaagcgggaatagttcttcaaagatctcccgatacaagtacgcttctttagaggttggcgtgttgtacgggaagcggaagcgggcagtttccagttgctgatcagaaacctgctgcgcagccacttctttcagggtgtcgatccaactgtaaccgacgccatcggagaactgctctttctgccgccaggccacgcttgcaggcagatacgcttcaaaacattcacgcaggatgtgtttttccattttgccgttaccgcacattttatcctgtgggttaatacgcatcgccacatcaaggaattttttgtcgaggaacggaacgcgtgcttccacgccccaggctgacatcgctttgttggcacgcgcgcagtcatacatatgcagggccagcagtttacgcaccgtctcttcatgcagttctttggcattcggtgctttgtggaagtaaagataaccgccgaacacttcatcagaaccttcaccggacagcaccattttaatgcccatcgccttgatcttacgcgacattaaatacatcggtgttgaagcgcgaatagtggtcacatcataagtttcgatgtggtaaatcacgtcgcggatggcatccagaccttcctgtacagtgaagtgaatttcgtgatgcaccgtgcccagatggtttgccacttcctgggctgctttcagatccggtgaacccggcagacctacagcaaaggagtgtaactgcggccaccaggcttcagagcgttcctgatcttccacgcgacgggctgcgtatttcttggtgatagcggaaataattgaggaatccagaccaccagaaagcagcacaccgtaaggcacatcagacatcagatggcttttaactgaatcttccagtgcctgacgcagctcgtttttgtcggtcacgttatctttcaccgcatcgtagtcgaaccagtcgcgatgatagtaagaacggatttcgccgtcctggctccacaaatagctccccgccgggaactctttaatcgtgcggcaaactggcaccagcgctttcatttctgaggccacatacagctgaccgtgttcgtcataccccatatacagtgggatgatccccagatggtcgcgaccaatcaggtaggcatctttttcgctgtcgtacagtgcaaaggcaaacatgccctgcaagtcgtcgagaaattccggccctttttcctgatacagcgcgaggatcacttcacagtcagacccggtctggaactggtaacgatcgccatattcggcgcgcaatgcctggtggttgtagatttcaccgtttaccgccagtacgtgggttttttgttggttgtagagaggttgcgcccccgcgttaacgtcaacaattgacagacgttcgtgggcgagaatggcgttatcgctggcataaataccggaccagtccgggccacgatgacgcatcaggcgtgacagctcgagggctttcttacgcagctcaactgcgtctgttttgatatcgaatacgccaaaaattgaacacataaccttctccgttaacctggtatttgttgcttgttgtgtttgcttgtttaaaaaaatgccgcaaagcagcactgtgcgcaagcgatttggcggtgaaaaaataaaaaacgtaatggtgattgtcgattggtgaaaaaaggtctggtgtgaggatatatttattgatgaatcgataatttttagcgggttttattgaatgtttatattttacgggggccaaattgctgacaaagtgcgatttgttcatgccggatgcggcgtgaacgccttatccggcctacaaaagcatgaaaattcaatatattgcaggagctgcgtaggcctgataagcgtagcgcatcaggcagtttggcgtttgtcatcagagccaaccacgtccgcagacgtggttgctattcagataacgtcgatttcagcgactgacgggtaaatccagctggggcggaaaggcatactgtcgatatcgtcgagcgacgaaacaccagaaagcaccagaatcgtctccagacctgcctggaagccggccagaatatcggtacgcaggttatcgccgacaatcaccgtttcttccgaatgcgcctgcattttgtttaatgctgcgcggatgatccacgggctgggcttaccaacatagaacggtttgcgcccggagattttctcaatccctgcacacaacgcgccacaagcgggataaaaaccgcgcccgtgggtgtccggattggtggcgataaaacgtgcaccgttagcgacgaaataggctgctttatgcatcatgtcccagttgtaggaacgcgtttcgccaacaatcacgaaatcagggttcacatcggtaatagtgaaaccggctttgtacagttcatgaatcagtgcgccttcgcccaccacatacgctttcttgccttcctggcgacgcaggaaatcggcagtcgccatcgcagaggtataaaacacgctgtcaggtacatcgacacctgcggtggcaaagcggttcgccagatcttgcccagtctgcgaaggatagttggtcagcaacaccagcggcaggcctttatccataatcccgtgcaaaaattccgctgcacccggtacggcgacgttatcgtgcatcagcacgccgtcgatatcgcaaattacatttttaatggtcatggactacccagaatattgacaacaataagcgccactataaaagcacattaattttccagcaaatgctggagcaaaataccgttgagcatggcgcgttttaccagcgcaaaagcgccgattgccgagcggtgatccagctcagaacgtaccaccggcagattagtgcgaaacgccttcagcgcctgggtattaatgcagctttcaatagcagggagcagcactttatcggcttcggtgatttcaccggcaataacaattttttgcggattaaataagttgatagcaatggcgatggttttacccagatgacgaccgacatactcaattacttccgacgccagactatcgcctttgttcgcggctttgcagatagttttgatggtgcagtcgtccagcggcacgcggctctggtagccctgctttaacagattcaacacccgttgttcaatggcagcgttggcagcgatagtttccaggcagccaaagttgccgcagtggcagcgttcacccagcggttcgacctgaatatggccaatttcaccgacgttgccgttgcggccaataaaaatgcgcccgttagagataatcccggccccggttccgcgatggacacgcaccagaatggagtcttcgcaatcctgacttgcaccgaagtagtgctccgccagcgccagactacggatatcgtgaccaacgaaacaggtcactttaaaacgttcttccagagcttctaccagcccccagttttctacctgaatatgcggcatgtaatgaattttgccgctgtccgggtcaacaagccctggcaggatcaccgaaatcgcgatcagctcgcgcagtttgcgctggtagctatcaataaactgagcaatggcattcaacagggcatgttccagcgtttgctgggtacgttccggcagcgggtaatgttcttctgccagcactttgctgctgagatcaaacagagtgatggtggcgtcatgacgaccaagccgtacgccgattgcgtggaaattgcgggtttcggtgacgatggagatagcgcggcggcccccggtggaggcctgctgatcaacttctttgatcagcccgcgttcgataagctgacgcgtaattttggttacgctggcgggggcaagctggctttgctcggcaatctgaatccgcgagattggcccgtactggtcaatcaggcgataaaccgccgcgctgttaagctgttttacgagatcaacattacctatctgagcttgtccgcctggtgtcatactttctcttattgagttacgacctcgttaccgttaacgatggtcttggtgattttaaaatcaggtgtgaatgcagtcaggttggctactttacctgcggcgagtgtgccgagacgtttctcaacgccaatcgcacgcgccggatagagcgtcgccatacgtagcacttcatccagtgcgataccgcaatgttcgaccagattacgcacgccttcaatcatggttaaggatgaaccgcttaacgtaccgttctcatccacacaaagtccgttacggtagtatattgttttacccgcaaaaatgaactgttcaatgttggcacctgctggcgcggtggcgtcagtaaccagacacagtttgtcgcctttcagacgtttagcgttgcgaatgttggcgtaatcaacatgcaggccatcagcaataataccgcaataaatgtcagcttcgtcgaggatcgcgcccgccaggccaggttcacgaccggtaatatacggcatcgcgttgtacagatgggtggcaaaggtaatccccgcgcggaaaccggcttttgcttctttcaacgtcgcgttggagtgaccggcagaaaccacaatcccggcatttgccagtttgctgatgacttccgcaggaaccatttccggtgccagggtcactttggtaatgacgtcggcgttttcacacaggaaatcgaccagcgcggcatcaggcttacgcacaaaattcggattatgggtgcctttttttaccagattcagccacggaccttccagatgcagacctaacgcctgattcggatgttttgccaggtactcgcgcataacgcgcacgccctgtttcatcagctcatcgctggtggtgataagcgtcggcagatagttagtacagcctgatttctcattggctttctgcatgatttccagcgtttccacgctgaccgcttcagcggtgtcgttaaactgtacgccgccgcagccgtttaactgcacatcgataaaaccgggggagagaatggccccgttcagtgaacgttgttcgatctctggcggcagttccgctaccggacagacgcttttaatcaggccatcagcgataacaaccgcgtggtcatcaagaaattcgtggccggtaaagatccggccctgggttaatgcatacattctgacccccgattttaaaaaatattgccctgagcaaggagccagggcagggataacaattacagacctttgatattttctgcttctaattcattgaaatatcttaaagtcttaactttcagctccatggtggaaggttcatcgcacaccatgatcgctttcggatgcagttgcagacagctgatggtccacatatggttcacgcaaccttcaacggcggcctgcagcgccagtgctttctggctacccagcaccagaatcatcacttcttcggcatccagcagtgtaccaacaccgacagtcagggcatattttggcacctgattaacatcgttatcaaagaaacgagagtttgcgacgcgagtgtcatgagtcagggttttgatacgagtacgagaagccagagaagacgccggttcgttaaatgcaatatgaccgtcgttacctacaccgcccataaacagatgaatttttccgtaagaacggattttttcttcatactggcggcactcggcgtcgatatccggggcgttgccgttgagaaggttgatgttttctgctggaatatcaacgtgatcgaagaaattacggtgcataaagctgtagtagctttccggatgctctttcggcagaccgacatattcgtccatgttgaaggtgacaacgtgcttaaagctgacctggcctgctttatgcatttcgactaacgctttataggtggtcatcggcgtgccgccagtcggcaggcccagtacaaacggacgatcggcagtcggtttgaacgcattgatacgattgacgatatggcgagcagcccatttgccgacctgttcagcggtagtcagggggatcagtctcattattcacctcaataagtaaaatgtaagccgttggcggattaggcatctttaagcgtaacctggatttgcgcagacaggcgtcaatccgacctgattttttgaatgataaaataagttttctggtttagccagtaaaagggagtgataataacgatatttggtgacaaaactcacaaaagacacgcgtttaatttgcgatacgaattaaattttcacacactctgtagcagatgatctaacaatctgattacagaacatcggcagtacaatttgcagcaaaataaaaatacggcttgaaacgagccaaatagggttctcgtagggggaataagatgaatattttaggttttttccagcgactcggtagggcgttacagctccctatcgcggtgctgccggtggcggcactgttgctgcgattcggtcagccagatttacttaacgttgcgtttattgcccaggcgggcggtgcgatttttgataacctcgcattaatcttcgccatcggtgtggcatccagctggtcgaaagacagcgctggtgcggcggcgctggcgggtgcggtaggttactttgtgttaaccaaagcgatggtgaccatcaacccagaaattaacatgggtgtactggcgggtatcattaccggtctggttggtggcgcagcctataaccgttggtccgatattaaactgccggacttcctgagcttcttcggcggcaaacgctttgtgccgattgccaccggattcttctgcctggtgctggcggccatttttggttacgtctggccgccggtacagcacgctatccatgcaggcggcgagtggatcgtttctgcgggcgcgctgggttccggtatctttggtttcatcaaccgtctgctgatcccaaccggtctgcatcaggtactgaacaccatcgcctggttccagattggtgaattcaccaacgcggcgggtacggttttccacggtgacattaaccgcttctatgccggtgacggcaccgcggggatgttcatgtccggcttcttcccgatcatgatgttcggtctgccgggtgcggcgctggcgatgtacttcgcagcaccgaaagagcgtcgtccgatggttggcggtatgctgctttctgttgctgttactgcgttcctgaccggtgtgactgagccgctggaattcctgttcatgttccttgctccgctgctgtacctcctgcacgcactgctgaccggtatcagcctgtttgtggcaacgctgctgggtatccacgcgggcttctctttctctgcgggggctatcgactacgcgttgatgtataacctgccggccgccagccagaacgtctggatgctgctggtgatgggcgttatcttcttcgctatctacttcgtggtgttcagtttggttatccgcatgttcaacctgaaaacgccgggtcgtgaagataaagaagacgagatcgttactgaagaagccaacagcaacactgaagaaggtctgactcaactggcaaccaactatattgctgcggttggcggcactgacaacctgaaagcgattgacgcctgtatcacccgtctgcgccttacagtggctgactctgcccgcgttaacgatacgatgtgtaaacgtctgggtgcttctggggtagtgaaactgaacaaacagactattcaggtgattgttggcgcgaaagcagaatccatcggcgatgcgatgaagaaagtcgttgcccgtggtccggtagccgctgcgtcagctgaagcaactccggcaactgccgcgcctgtagcaaaaccgcaggctgtaccaaacgcggtatctatcgcggagctggtatcgccgattaccggtgatgtcgtggcactggatcaggttcctgacgaagcattcgccagcaaagcggtgggtgacggtgtggcggtgaaaccgacagataaaatcgtcgtatcaccagccgcagggacaatcgtgaaaatcttcaacaccaaccacgcgttctgcctggaaaccgaaaaaggcgcggagatcgtcgtccatatgggtatcgacaccgtagcgctggaaggtaaaggctttaaacgtctggtggaagagggtgcgcaggtaagcgcagggcaaccgattctggaaatggatctggattacctgaacgctaacgcccgctcgatgattagcccggtggtttgcagcaatatcgacgatttcagtggcttgatcattaaagctcagggccatattgtggcgggtcaaacaccgctgtatgaaatcaaaaagtaatctgctttatgcctgatgcgacgcttgagcgtcgcatccaacaatgacaagcggtggagatcttctctgccgctttttttttcatcaatcatccccataatccttgttagattatcaattttaaaaaactaacagttgtcagcctgtcccgcttataagatcatacgccgttatacgttgtttacgctttgaggaatccacgatgagtgaggcagaagcccgcccgactaactttatccgtcagatcatcgatgaagatctggccagtggtaagcacaccacagtacacacccgtttcccgccggagccgaatggctatctgcatattggccatgcgaaatctatctgcctgaacttcgggatcgcccaggactataaaggccagtgcaacctgcgtttcgacgacactaacccggtaaaagaagatatcgagtatgttgagtcgatcaaaaacgacgtagagtggttaggttttcactggtctggtaacgtccgttactcctccgattattttgatcagctccacgcctatgcgatcgaactgatcaataaaggcctggcgtacgttgatgaactgacgccggaacagatccgcgaataccgcggcaccctgacgcaaccgggtaaaaacagcccgtaccgcgaccgcagcgttgaagagaacctggcgctgttcgaaaaaatgcgtgccggtggttttgaagaaggtaaagcctgcctgcgtgcgaaaatcgacatggcttcaccgtttatcgtgatgcgcgatccggtgctgtaccgtattaaatttgctgaacaccaccagactggcaacaagtggtgcatctacccgatgtacgacttcacccactgcatcagcgatgccctggaaggtattacgcactctctgtgtacgcttgagttccaggacaaccgtcgtctgtacgactgggtactggacaacatcacgattcctgttcacccgcgccagtatgagttctcgcgcctgaatctggaatacaccgtgatgtccaagcgtaagttgaacctgctggtgaccgacaagcacgttgaaggctgggatgacccgcgtatgccgaccatttccggtctgcgtcgtcgtggttacactgcggcttctattcgtgagttctgcaaacgcatcggcgtgaccaagcaggacaacaccattgagatggcgtcgctggaatcctgcatccgtgaagatctcaacgaaaatgcgccgcgcgcaatggcggttatcgatccggtgaaactggttatcgaaaactatcagggcgaaggcgaaatggttaccatgccgaaccatccgaacaaaccggaaatgggcagccgtcaggtgccgtttagcggtgagatttggattgatcgcgccgatttccgcgaagaagctaacaagcagtacaaacgtctggtgctgggtaaagaagtgcgtctgcgtaatgcttatgtgattaaggcagaacgcgtcgagaaagatgccgaaggtaatatcaccaccatcttctgtacttatgacgccgataccttaagcaaagatccggcagatggtcgtaaagtcaaaggtgttattcactgggtgagcgcggcacatgcgctgccggttgaaatccgtttgtatgaccgtctgttcagcgtgcctaacccaggtgctgcggatgatttcctgtcggtgattaacccggaatcgctggtgatcaaacagggctttgctgaaccgtcgctgaaagatgcggttgcgggtaaagcattccagtttgagcgtgaaggttacttctgcctcgatagccgccattctacggcggaaaaaccggtatttaaccgcaccgttgggctgcgtgatacctgggcgaaagtaggcgagtaattttaagtttcgctatgccggatggggcgtttacgtcgcatccggcaaggaacagacaaacagtttcaaacgctaaattgcctgatgcgctacgcttatcaggcctacatgatctctgcaatatattgagtttgcgtgcttttgtaggccggataaggcgttcacgccgcatccggcaagaaacagcaaacaatccaaaacgccgcgttcagcggcgttttttctgcttttcttcgcgaattaattccgcttcgcaatttatccataaaataaatttaaaataacaaaacataattaaataaaatgtaaccgctttcatcttgctggaatttcacgcttttattcttctgcaagcctttcaaccgcaaacttaagccttgtaacaaaaatcatcaaaatatgtgcggttgctcatgttcttacattctggttacagaaagagattgataattcgcgtcgcgaaaaatagtctgttcctgtagtcagcgagacttttctcaacgctacttttttaatttttattttttcgctgttcacctttggtgcagcaatttatacgtcaaagaggattaacccatgcgtacgtttagtggcaaacgtagtacgctggcgctggctatcgccggtgttacagcaatgtcgggctttatggcaatgccggaggctcgcgccgaaggattcatcgacgattcaaccttaaccggcggtatctattactggcagcgtgaacgcgaccgtaaagatgttaccgacggcgacaaatacaaaaccaacctttctcactccacctggaatgccaacctcgattttcagtccggttatgctgctgatatgttcggccttgatattgctgcgtttacggcgattgaaatggcggaaaacggcgacagctcccacccgaacgaaatcgcgttttcaaaaagtaataaagcctatgacgaagactggtccggcgacaaaagcggtataagcctgtataaagctgcggccaaatttaaatacggtccggtttgggcgagggcaggttacattcagccaactggtcaaacgctgttagcgccgcactggagctttatgccaggtacttatcagggggcggaagccggggcgaattttgattacggcgatgctggtgcgttgagtttctcctacatgtggaccaacgaatacaaagcgccgtggcatctggaaatggatgagttttatcagaacgataaaaccaccaaagttgattatctgcactcctttggggcgaaatacgacttcaaaaataacttcgtactggaagcggcatttggtcaggcggaagggtatatcgatcaatattttgccaaagccagctacaaatttgatatcgccggtagcccgttaaccaccagctaccagttctacggtacccgagataaagttgacgatcgcagcgtcaacgacctttatgacggcaccgcctggctgcaagcgttgacctttggttaccgggcggctgacgtagtggatttgcgcctcgaaggcacctgggttaaggctgacggtcagcagggatacttcctgcaacgtatgactccaacctacgcttcctcaaacggtcgcctggatatctggtgggataaccgttctgacttcaacgccaacggcgaaaaagcggtcttcttcggtgcgatgtatgacctgaaaaactggaatcttccaggcttcgccatcggcgcttcctacgtttacgcatgggatgctaaacctgcgacctggcagagcaatccggatgcgtactacgacaaaaaccggactattgaagagtctgcctacagcctggatgcggtctataccattcaggacggtcgcgccaaaggcacgatgttcaaactgcatttcaccgaatacgacaaccactccgacatcccaagctggggcggtggttacggcaacatcttccaggatgagcgtgacgtgaaatttatggtaatcgcaccattcaccatcttctgatgcccgacgcggcaggttttgtgcctgccgcacgtttgaggaatttgctatgaaaaaactgattctcatcgccataatggcatcggggctggtagcttgtgcgcaatcaaccgcgccacaggaagacagtcgtctgaaagaggcatacagcgcctgtatcaacaccgcacaaggttcgccagaaaaaattgaagcctgccagagcgtgttaaacgtgctgaagaaagagaaacaacatcagcagtttgccgaccaggaaagtgtacgcgtactggattatcagcagtgtctgcgtgcaacgcaaaccggaaatgatcaggcggtgaaagccgattgtgataaagtctggcaggaaatacgcagtaataacaaataagtgagagctgtaactctcgcttttcttatttcccttgcataaaaaagccaacccgcaggttggcttttctcgttcaggctggcttatttgccttcgtgcgcatgttcatcttcgcggcaatcgccttcggcacagtgaccgtaaagatagagactgtggttagtcaggcgaatgccatgttttgcggcaatttcacgctgacgcgcttcgatggaatcatcactaaattcgataaccttgccgcagtcgaggcagatcaggtgatcgtggtgatgttgctgtgtcagttcaaatacggatttaccgccttcaaaattgtggcgggtgacgataccagcgtcgtcaaactggttcagtacgcgatataccgtagccagaccaatttcttcacccatatcgatcagacgtttgtataaatcttccgcactgacgtgatggttgtccggctcctgaagaacttccaggatttttaaacgaggaagcgttactttcaggccagctttctttagggcggtattgttatcagtcatgcggaatctgtcctgttactaagcggttcacttcattagaagaagtgacagaatttgctcttgagataatgcgtatcattatagaattgccacgcctaaatgaaaaccacaagtccctggcaaatattgttaataaaaacgtggcacagcttacatttacaacggcaaggccacttgaacaccgggacattgtacaggtacaacagcaaaagttacaaatttgtagcaattattttgattggcattatctattaatacggcgtagacatgagtctacgccgcatcacatcaggcattgagaatttcgtcgagatgcaactcttcagaaatctgtttaacccatttttctacacgttcagcggtcagttccggctgacggtcttcgtcgatagccagaccgacaaagtggtcgtcatctgccagaccttttgatgcttcgaaatgatagcccgcagttggccagtgaccaacgatggttgcaccgcgcggttcaatgatgtcgcggatggtgcccaatgcgtcgcagaaatattcggcgtaatcttcctggtcaccacaaccaaacagcgcaaccagtttgccgttgaaatcaatctcttcgagagtcgggaagaagtcatcccagtcacactgcgcttcgccgtaataccaggttgggatgcccagcagcagaatgtcataagcttccagatcttctttgctgctttttgcaatgtcatggacatcggcaacgtctttaccaagctgtttttgaatcatttttgcgatattttcggtattaccggtgtcgctgccgaaaaagatgccagtgatagccatgagtgaaataacctcttgaaacttattgaaatgggggtggaaaattgcccacggataaaggcaatcatagcagaacaggcagtcttgcggaatcagcaaacgagcaggactgcacactgtgctacatgaaagtggaaatttaaacgatgccctgactacgcagcgccgccagttgctgcattaacatctcttcgatcagttcgctacggctcatattgcgcgactccgccagctcgttcagcgcctcgacagcttccgcgttcagcttcagttcgacacgcttaaggccacgtactttgtcgcgttttagctggttgcgtttattaatacgcagctgttcatcgcgcgaaagcggattagttttcggtcgtcccggtcgacgctcgtgcgcgaacagatctaatgtcgtacggtccgtttgttctttggccatgatcttggtgacttcgggggaaacaatcagccaggcctctgcccggatggatagcgcgccataatacatcagcgcgatgagtcacgccaacgcccacgcgcggaaagcgacgcggacgctgggtttttaatcagttgcgttaatcattgagatagcgacggatagcgcgtaataccgcatccggtttttcagcatggacccagtgacccgcgcctgcaatcacatgcgcccgtgcctgtggaaattgagccagtaaatcatcacggtactgctcgctaacatacggagaattgccgccagggataaacagggcagggtgatcccatgccgggattttctcccaacctacaatatgcggatactgatcccacaataccggcacgttaaagcgccactccccgtcaacaaaagatttcagcagaaactgaatcaccccttcttcattaagatgctggcgcattattgctgctgcttgctggcgagtttgtgcgtccgattcactgaccgcgttgatagccgcaaaaatctcatcatgacggcgtacgtgatagtcgaccggcgcgatatcgatcgccaccagtttatcgatgcgatcggaggctagtgcagtaagtgccattaccgctttaccgcccatggagtgaccgataaatgttgctttgtcgatctgctgtgcatccagagtatcaacaagatcctgcgccatcgccgggtaattcattaccggatctctcggtgaaagaccgtggttacgcatatcaacctggatgatattgtgatcgtttaccagatcgcgagccagtacgccaaggttgtcgaggctgccaaacagaccgtggacaagaacgatgggagaattattgtgctggttttgtgcagtttgcgcgcggatattcaatttcatggcaaagttctttttttcgcgttgtcgggttagggtattatgttgaccattgtgccacagggctgcaacaaataaggtttattccgagtttttctgcaagccaggcttgacgctatccgctgccgggatttattcatatactcctggcgacttgtattcagctaagacactgcactggattaagatgaaaacgattgaagttgatgatgaactctacagctatattgccagccacactaagcatatcggcgagagcgcatccgacattttacggcgtatgttgaaattttccgccgcatcacagcctgctgctccggtgacgaaagaggttcgcgttgcgtcacctgctatcgtcgaagcgaagccggtcaaaacgattaaagacaaggttcgcgcaatgcgtgaacttctgctttcggatgaatacgcagagcaaaagcgagcggtcaatcgctttatgctgctgttgtctacactatattctcttgacgcccaggcgtttgccgaagcaacggaatcgttgcacggtcgtacacgcgtttactttgcggcagatgaacaaacgctgctgaaaaatggtaatcagaccaagccgaaacatgtgccaggcacgccgtattgggtgatcaccaacaccaacaccggccgtaaatgcagcatgatcgaacacatcatgcagtcgatgcaattcccggcggaattgattgagaaggtttgcggaactatctaaaacgttgcagacaaaggacaaagcaatggcaatccacaatcgtgcaggccaacctgcacaacagagtgatttgattaacgtcgcccaactgacggcgcaatattatgtactgaaaccagaagcagggaatgcggagcacgcggtgaaattcggtacttccggtcaccgtggcagtgcagcgcgccacagctttaacgagccgcacattctggcgatcgctcaggcaattgctgaagaacgtgcgaaaaacggcatcactggcccttgctatgtgggtaaagatactcacgccctgtccgaacctgcattcatttccgttctggaagtgctggcagcgaacggcgttgatgtcattgtgcaggaaaacaatggcttcaccccgacgcctgccgtttccaatgccatcctggttcacaataaaaaaggtggcccgctggcagacggtatcgtgattacaccgtcccataacccgccggaagatggtggaatcaaatacaatccgccaaatggtggcccggctgataccaacgtcactaaagtggtggaagacagggccaacgcactgctggccgatggcctgaaaggcgtgaagcgtatctccctcgacgaagcgatggcatccggtcatgtgaaagagcaggatctggtgcagccgttcgtggaaggtctggccgatatcgttgatatggccgcgattcagaaagcgggcctgacgctgggcgttgatccgctgggcggttccggtatcgaatactggaagcgtattggcgagtattacaacctcaacctgactatcgttaacgatcaggtcgatcaaaccttccgctttatgcaccttgataaagacggcgcgatccgtatggactgctcctccgagtgtgcgatggcgggcctgctggcactgcgtgataagttcgatctggcgtttgctaacgacccggattatgaccgtcacggtatcgtcactccggcaggtttgatgaatccgaaccactacctggcggtggcaatcaattacctgttccagcatcgtccgcagtggggcaaagatgttgccgtcggtaaaacgctggtttcatctgcgatgatcgaccgtgtggtcaacgacttgggccgtaaactggtagaagtcccggtaggtttcaaatggtttgtcgatggtctgttcgacggcagcttcggctttggcggcgaagagagtgcaggggcttccttcctgcgtttcgacggcacgccgtggtccaccgacaaagacggcatcatcatgtgtctgctggcggcggaaatcaccgctgtcaccggtaagaacccgcaggaacactacaacgaactggcaaaacgctttggtgcgccgagctacaaccgtttgcaggcagctgcgacttccgcacaaaaagcggcgctgtctaagctgtctccggaaatggtgagcgccagcaccctggcaggtgacccgatcaccgcgcgcctgactgctgctccgggcaacggtgcttctattggcggtctgaaagtgatgactgacaacggctggttcgccgcgcgtccgtcaggcacggaagacgcatataagatctactgcgaaagcttcctcggtgaagaacatcgcaagcagattgagaaagaagcggttgagattgttagcgaagttctgaaaaacgcgtaaacacatttaataaaaaaagggcggtcgcaagatcgcccttttttacgtatgacaaacacagaattgcctgatgcgctacgcttatcaggcctacgaggatggtgcaatatattgaatttaagcgattttgtaggccggataaggcgttcacgccgcatccggcaaaaacaacgaacactttgtcaacaaactgagtagctcaaggaaatcccaatgaagaccaacaggagtctggtcgtcatagtgtcactaattaccgccacattactgctgactgcatgcgcccaacctgaacaatcatcattagctggcgactggttactgacccctaaagataaaaccagaggattaacgggtagcattgcggtaaatattgcacctttccggtgtaagacaaattgccgtggtgataacttacctgataatacccgccgctggcagttgtcaggcgggaacgaaaaagaacttacttatcttcataatatgtcagcacaagaaaaggtcggtttaaatcccggttggcaatgctacacctcattttttatgcgggtttgccagggcaagcccggcactcgaccgatagtcaatgaggattatgtcagcgaaagcggattttttggctcgatgatgcatgtcgggattattgagttacgacgctgccagtcagaaaattgccagcaagaattgaaagcgataaatacacattaaaatagtgagtccgggaatgaaacccggacctgaacatgtcttattgcgtgaatgtttctttcatttgatactgcatttcccagagttcagtaagcgaaataacttttcttgttcttgcttcttcactttgtacccataagaaagggtagaacgtgaaggcttccgttgccgataattttattacgtcttctcgccattgctgccatcgtacattttcatagaaggtatctaaatcaccggataatgcccactgaagaaactcagaatatccaacttccagactttcccaattcagcgtatctggcgcaaaataataaacgcagccagtatcttccccaagatcgccaccattaagagcaaaaattacccctgcgacatcgtcagcgatgggtaaagcccgcacgcctgcgaattcagggcgttgtgtccaacttactggatctcgtggcaaccgggggtgaccagatcctgctatgcgtaactaaccattatcaatcagcagacctccggagccatagacaagcgcacccatcggtgattttgttgtcacctgtaattgataaagtgcggtttcggctaaatctttattaaccggtaagagttcggtatggtttgtggcgtcttttaaccagttctggattattggccaggctgaatcttcagtatttactaactgattcatttcacgcatcgctacttgctccttgtgtgctacggtgtcatttatgatgaggaattgtatggaacattttttaaatattaagttccttatatttgaataaaaaatgactttatccatacattgccacttttttcaaagcataaaccgatacccaataccggtttcagtaataaaatggcgaggccgggccggatcctgttccagtttttgtcgcagatgccccatataattacgcaaatagttgctgtgttcgatcgcgtttagaccctacatctgccggatgcggcataaataacgaactatttgccaacaaacagaaagggcgatcattcaatcgcccttttttactttgttttattaaccgtgtttatttttcagttcaaagcgtggtgataccagaccatacagtgtccaaccaaggaaggtcacgatggaaccgtacagcatggcttcttccccggatgagtacagcgcataaaagctatacatcgcgccaacaaaagcaacaaagtttgcaactttcgcttttgaggggggcacattagcgaccttctgaataatgactaatgccgccattgacagaatatacggaatgatattggtcaccacggccaggttaaccagcacgttgaactgactgtttagcgacgggctaatggtcatcagtgccaatccactctgaataatcacaatggtcaacattccctgcaccggtgcatccactttggttacacgggagaaaattttagggaagtagccttcatcagatgaagatttaaacacctgggcaatggtgaactgccagccaagtagcgaaccgcagcaggacatcaccatcagcgccataatgactttacccacttccggcgtgaacatctgcgcgaaggccagaccaaatggtgccgttgaatttgccagctccatatttggcacaatcccggcaatcacgttggtggagacgatataaatcaccgccgcacctaacgtaccgccgagtaccgcgattggcacattacgttccgggttttccactacatcagtattcgcacacgcagactccagaccaagaaaagcccacagcgtcatagcgatggaagaacctaccgcactgaagaacggtgcatgatgcggattccaggaatcaacgtacagcgtcgggctaaaccagaaccagccaataatgcacagaccgacgaccggaataatgaccccccacacggtaatgctactgatttgcccggtaatgcgcgcaccaccaaagttagccacggtacaaatccacagcaccccgatggtcgcaagaccaatctgcactggcgacaaactcgcgccgagcagttcggtgccgtaaccaaccgccgaaatagcaatcgcgacgttagcaatcagcagtgagacgccgtaggtatagttcgccataaagttaccggatttaccgaaagcatactcggcataaccgcccataccgcctgatttacggctgaacataccgcattttgcgaatgcccatgccagtgccattgagcctacggctgtcaccagccaggagataattgagattgtcccgacttcggcaagctttgtcggcagcatgatgataccggagcccatcatgttgaccatcgtcagtatggttaactgaacgacgcccattttgttcgatttagcctgactcataatttttcccctttcaacagggtgctttgcgcatcacgaggcttgatgacatagcaccaaacttgcttacgaccatcatgttcttcgatatagacaccctgcagctccggtgcaaaacctggcagcaggttgatcccttcttccagagcgctgaagtaacgcagaacagcaccaccccagatttcacccggaacaacacacagcacacccggaggataaggaagcgcaccttcggcagcgatacggccttctgcatccggcagacgaaccagttccacttcaccgcgtaaataggcgtagttggcttcttgcggattcatgctgacgcgtgggaagtgctccttacggaacatctctttttgcagttgtttcacgttgtggcgggcatacaaatcatgcatttcctgacacaactgacgcagggtataaccggcgtagcgctcttcatgctgtttgtagatggaaggtagcacttctgctaatggcgcgtcggactcaagcagtttttcgaagcgtaccagcagggcaacaagttgctgaagtttggccatatcttctgccggagtcagcaggaagaggatggagttaagatcgcatttttccggcactacgccattttcgcgcaggaagttagcaagaatcgtcgcgggtacaccgaacgcttcatattcgccgttacgtgcatcaatacctggggttgtcagcaacagtttgcatggatcgacaaagtattgattctctgcatagccttcaaaagaatgccagtgttcccctggtacaaactggaagaagcgcagatcaaccgcaatttgcgctgtttcatacgactgccagggtttaccatccaccagttcaggtacgaacggacgaatatgctgacagttatcgaggatcagtttgcgggcattaatgccatttaccacacaatccatccacatattacgaccgctgacaccttcatgcattttggcgttgatattcagtgcggcaaacagcggatagaacgggctggtggaggcgtgcatcataaaggcgttgttcatgcgtttgtgcggtacataacgctgttgccctttgatgtggctgtcttttttatgaatttgtgaagtctgagaaaaaccagcctgttgtttatgcacagattgcgtaaccagaatacccggatcgttctcattaagatccagcaacagcggcgaacagtccgccatcatcggaataaactgttcatagccgacccatgctgagtcaaacaggatgtagtcacacagatgaccaattttatccaccacttggcgggcgttataaatcgtaccgtcgtaggtgcctaactgaatcacagcgaggcggaaaggacgagcctcttttgcccgctgcggtgcgacttccgcgatcagctcacgcaggtaactttcttcaaaacagtgcgcatcaatgccaccgataaagccatacgggttacgtgccgtttccagataaaccggtgttgcaccagcctgtagcaacgctccgtggtggttagatttgtggttattgcgatcaaacagcaccagatcacccggtgttagcagggcgtttaaaaccactttgttagaagatgaagtgccatttaaaacgaagtaggttttatcggcattaaacacttttgccgcatgttgctgtgcaatgcatggcgcgccttcgtgaatcagcagatcgcccatcgctacgtcggcgttgcacaagtcggcacggaacagcgcctcaccaaagtattccacaaactgattccccgccggatggcgacggaaaaattcgccgccctgatgaccagggcaatcaaacgcgctgttaccttgattgacataatcgaccagtgcgcggaagaaaggtgggcgcagttgagtttcataatggctggcagcggtttctaactggcgaccataaaattctcgtcgcgattcgcaattctcaaagacacccgaaatacggggcaaatactctgcgggtacacgttcttgattttcagtagcaataaataccgggatgccataacccgtggcatcgatttcatcgagttttccgcatgtaacatcgttgagcgataaaactattgccgccacatcgatattacgactttcattaatgtagatacattctcgctgcgtggtaaaacagtccgggcaagaatcactaaccgcaatttttaattttgacatttttcatctctttattttaggtaatagcaggtcctcaatttctcgaatgagaaatcgatcgtgccggaaaaaagcaaagttaccccgctgataaataaatcaggtagattgcttttttcagaatgcagaaacccttaccagtcaggtggctgataatacaagggttaacagagaatgagcactgcggaatacaggcatatgcctgtaatacagagagtcaggaagacctgtacgctgaagtgcccttagtcggtagactaacgggcattgaagaagtgaaagtcgaagctattgcgatgagcaaacttcataatatgagttgtccgccttatatggggcatagtgcggctgttattttccatttaatttacctttcctgatgtgaatgaaggtgaagatattctatccaggaaatacggttgaactgtgaaggtgatcaataaaaaatgatcaatcttaatttatttaatgatgagctttttactcagtaatataaaatattgaattgttatttttgtgtgttgtttaagataaaaagccgtatttattattacggctttaattaataaaaggcaggctgtattaaaattaatattcaaagcataaaccgatagccaataccggtttcagtaatgaaatggcgtgggcgggcgggatcctgttccagtttttgtcgcagatgtcccatataaatacgcaaatagtgactgtgttcgaccgcgtttggcccccacacctggttaaggagctggcgctgggtgagtacttttccggcattgttgagcagcaccgccagcaggcggaactcaattggtgtgagatgcacctcttcctcaccccggtgaatcacgcgggcggctaaatcgacggtaacatcggaaaattttaccagcggatcgggcgcggtggtggcagagtggcggcgtaatgcgacgcgcagacgggcctgcaattcgccaatgccaaacggcttactcagataatcatccgctccggcatccagcgcggcgattttgtcgctctcttcgctgcgtgcggaaagcacaatcaccggcaccgcgctccactggcgcaggtcgcggataaactcaatcccatcaccatcgggcaggccgagatcgagaataatcaaatctggcttacgggttgccgcttccagcaagccgcgttgcagcgtttcggcctcaaagacgcgcatcccgtcgccctccagcgccgtgcgcagaaagcgacgaatagcctgttcatcttcaacaatcagaacgtttgtcacatatcctcatgaaattcttcaagttcaggggcagtttgctggggaagtgtaacacgaaaacaggcaccaccttccggtcggttgaacgcggtaatagtgcccccgtgtacatccactatcgcccgacaaattgccagtccaagccctacccccggtactgccgactctttattcccgcgagcaaacttatcaaatatcgtctgctcctggcctggcggaagaccggggccgttatcccagacatccagttgtagattttcgccctcaacgtgggcatcgataccaatttcggcctgcgcacccgcatatttcaccgcgttctccagcagattaatcagcacccgttcaaagagtggcccgtcaacgtggattaaggtcagcggttctggcagagaaagattgatgggcgacgataaacccggttccagcatttgcagcgcgctgccgactacttcttccagcgttaaccactctttcttcaaattaaagccgccggactgaattcgcgccatatccagtagattattcaccagtcgggtagtgttcagcacatgctgacggatctcgctggcctggcgggcgtggggtgatccttcgcttgccagatcgagcgttaagatttctgcctgaccaaacagcaccgtaagcggcgtgcgtaaatcatgcgaaagcgccgccagcagggcgttgcggatctgttcacgttcgcttgccatccgcgcctgttcttcgctggcggttagcgtcagccgctcaagggcattggcgactaacagcgtaaacgtctccagcaggcgctgctgttccgggatcatcaactggcgcagattccccggctccaccaccaccagcccgtaggttttctcgccgctttttagcggcaaaatctggtacggtacaccgggtaacgtgtcggtgcccgcgcccgcaggcaggcctttatcaaaactccactgcgcgatggcatcgtcccacggcgtcattccttgcggatgtgttaacggctgcaatttaccgttgtcatcgggcaacaacacctgactgcgggcatgaaacgtggaggcaataaattgttcgctggtggcagcgatatcctgcggactgcggcccaccgccagagctttcgacatttcatataagtgccgtgtgcgttgctcgcggtaacgggctacccgcgcctgataacgcacgccagcagtaaggttcccgatcaccagcccgacggttaacatcaccgcgaaggtcagcagatattgcacatcagagacggcgagcgtgccgcgtggggcgataaaaaagagatcgaaactcactacattaatgacggtggcaaccactgaaggccagcgtccataaaatagcgccaccaccaccacgccaagcagatacagcatcaccaggttggcggcatcaaacgccatcagccactgcatggcaattaaggtgataacggcgcataacgcggcggcaaccacgcatccctgaatttgtacacgccacttgtctttaaaagagcggttatccggcgcgttgttaatcgtgcgggcgggtggttcatcaagcgcgaccagcacctgatcgagatcgggggcgatgcgcgccagtcggtcagcaaacgtttcccgacgccaccagcggcgcgaggccgggcgaccgagaataatcttgccgagattatgttcacgggcataacgcactaccgctttctcttccgctggatcagaaagtgttgccgtctccgcgcccagttcctgcgccagacgtaaggcgctgagaattgcccgacgttttttttccggtaagcggtgcagggcaggggtttcaacatacaccgcgtgccagacgctacccagccgtgacgccagccgcgccgctgcgcggaccagtttttcgctgccggtgttatggccgatgcataaaaggatcgcgtcgcgcgtgtgccacactttctcttcgccaggatgcccccgccaggcgcgcatttgctcatcaacgcgatcggcagtacggcgcagtgccagttcgcgcagggcgatcagattacctttgcggaaaaaatgttcaatggcgcgctccgcctgcccggcaatatagactttgccttctttcagccgctggcgcagatcgtccgggggcaagtccaccagcaccacgtcgtcggcggcatcgaaaaaaggatcgggcacggtttcccgtacctgaattccggtgacgccgctgaccacatcattcagactttccagatgctgaacgttgacggtagtgaaaacatcaatgccagcttccagcagttcttcgatatcctgccagcgtttgggatgacgggaacctggcgcattactgtgcgccagttcgtccattaagatcagcgccgggcggcgggcgagggcggcatcgagatcaaactcgctgatatgccgcccacggtacgcctggcgttttaacggcagaacagccagcccttccagcatggcggcggtatcttttcgcccgtgggtttctaccacgccaaccacaatatccagcccttgcgcccgcagtcgctgggcttctgccagcatcgcccaggtcttcccgacgcctgcacaggcaccgaagaaaactttcagcttcccccgatgcggcgcggcagtttgttccagcagacgatcggggtcgggacgtaagggttcgttattcatcaagtttatccagcgccagattgagttcaacaatgttgacaaccggctggccgatatatttcaccagcggttgttggctgtattttgcgatcagttgcgtgagctgttcaacgctgagattacgcgctttcgccacgcgtgggatttgccaggccgccgcttgcggggtgatattattgtccagcccgcttgccgatgccgtcaccagttcaaccggaacgctcgcgctggcatccgggttagcggcccgtaatgcagcaacgcgtgcggctattagtttatccagctcagggttactgaccgccagattgctcccgccagaagcctgtggattatagggcatttctgccgttgccgacgggcgaccatgaaaatagccgttgccggtaaaattctgcccgattaatgccgaaccgcgcaccgtatcaccttcacgaatcaacgaaccattggcctgccagggaaaccaccattgccccagtacggtggtcagcagcgggtaaacgccgccagtaatcaataacagaaagataaatgttgataatgccggacgtaatccactcatggtaaacctcacaccagaccgcaaacggtcagcagtaaatcaatgactttgataccgataaacggcaccagcagcccacccagaccgtaaatccataagttacggcgcaacatggcagaagcggtaagcggtttataactcacgccttttaacgccaggggaatcaaaaagacgataatcaaggcgttgaaaatcaccgcactgaggattgcggagtcgggcgaatgcaggcacatgatgttcagcgcatttaactgcggatacgttgccgcgaatgccgccggaataatggcgaagtatttcgccacatcgttggcaatgctgaaggtggtcagcgagccacgggtcatcagcatctgtttgccaatgtgcaccacctcgatcaacttggtcgggttagagtcgagatcgaccatattgcccgcctctttcgccgcctgggtgccggagttcatcgccaccgcgacatctgcctgcgccagcgccggagcatcgttggtgccgtcgccggtcatcgctaccaaacgaccttccgcctgatactgacggatcaatgccagcttggcctccggtgtcgcttcggcgagaaaatcatcgacacccgcttccgcagcaatcgcggcggcagtcagacggttatcgccggtaatcatcaccgttttaatgcccattttgcgcagctgggcgaagcgctctttaataccgcctttgacgatatctttcagcgcaataacgcccagcacacgagaaccttccaccaccaccagcggcgtggctccctgacgcgcaacctgatcgactttttgatcaacatcggtagggaagtgaccaccgttagcctcaacatggcgacgaatggcatcgacagaacctttacggatcatgcggttgtcgatgttgatcccgctcatccggctttgcgcagtaaacggtacaaaggtggcatggagcgactgcacatcgcgctcgcgcaggttaaaacgctgcttggcgaggatcacaatactgcggccttccggcgtttcatcagccagcgaagccagttgtgcggcgtcagccagcgttttttcatccacgccctgcgcggggataaactccgacgcctgacggttaccgagtgtgatggtgccggttttatccagtagcagaacgtcaacgtcacctgccgcttcaactgcacgtccgctggtggcaatcacattcgcgcctagcatccggctcatcccggcgacgccgatcgctgacaacaggccgccaatagtggttgggatcagacagaccagcagcgccaccagtaccgttacgctgactgcattaccgccccacgcggaaaacggccacagcgtggcggttgccagtaaaaagacgatagtcagggcaatcagcagaatggtcagggcaatttcgttcggcgttttgcgtcgctgtgcgccttccaccatcgcgatcatccgatccagaaatgtctcgccggggttaacgctacactcaatcaccagccagtcagaaagaatacgcgtgccgccggtgacggaggcaaaatcgccgccggattcacggatcaccggtgccgattccccggtgatggcgctttcatcgaccgatgcacccccttcaataacttcaccatcgcaggggataatatcgccagcttctaccagtacgatatcgcctttacgaagttggtcggcaggaactttgtccgccgcagcgccatatttcggctcacgcagcttgcgggcaaaggcagtttttttcacccctttcagactgttggcctgcgctttactgcggccttctgccagcgcctcggcgaaattagcgaacagtacggtgatccacagccaaccgctaatggccgcgctaaacagcgcattgccgggcatcgcaccgcttgccatcgcgatgctaatacaggtggtcagcagactgccgatccagacgataaacatcaccggattgcgccattgcgcctgcgggtttaattttttcaccgcttctttcagcgcctgaacgacaagtgttggttcgaatagcgccagttgtttacgactcatattcagtgctcactcaatatcatcaggagagatattccgccaccggaccaagcgccagggcagggataaaggtcagtgcgccaaccagcaacacggtgccgattaacaggccaacaaacagcgggccgtgcgttggcagcgtgccggagctggcggcttggctctttttactcaccagcgaaccggcaattgccatcaccgggataatcaccccgaagcgaccgacaaacatgcagaacgccagtaaacagttccagaacggagagttggcgcttaatccggcaaaggcgctgccgttgttgttagcggcggatgacacggcgtacagcacttcgctaaaaccatgcgggccagggttgagcatggcgctacgtccggcgtcggtcatcatcgccaacgccgcgcccatcagcaccagcgtcggggtaaccagaattgccagtgcagtcagtttcatctcgcgtacgtcgatttttttacccagatattccggtgtacgaccaatcatcagcccggcaataaacaccgccagcaggacaaacagcatcatgccgtaaagaccagaaccgacaccgccgaacaccacttcaccaatttgcatcagccacatcggcaccatgccaccgagagcggtaaacgaatcatgcatcgcaatcaccgcgccacaggaagccgccgtcgtcacgaccgcaaacaggctactgaccagcacgccgaaacggctctctttaccttccatattgatgctgctgtccgtgcccagtgccagcagatgaggattaccctgaacttctgcccacatcaccacgcctacgcagatgacaaaaatcactgacatcgcccacagcaacatgcgcccctggcggcgatcgcccatcacttcaccaaaggcaaagcacagcgccgttgggatcaagaagatcgccagcatctgcacgaagttggtcagtgcggttgggttttcaaacggatgcgacgagttggcattaaagaagccaccgccgttagtaccgagcatcttgatcgcttcctgagaagctacaggccccatgggtaacagctgttgcgctccttcaacggtattcacagcctgataaggcagaaagttttgcagcgcaccttgttgaataaaaaacagtgcaatcaacaacgccacagggactagcacccataacgtgatgcgtagcagatcgacccaggcattcccgagcgtgctcatgctctggcgggtaaacgcacggatgagggcaaaaatcaccgcaatcccgctggcggcagaaagaaagttttgcaccgttaagcccgccatctggctgaaatagctcaacgtggtttcaccgctataagattgccagttggtattggtgacaaagctgacggcggtattcagcgccagatcccacgacagccctggcaactgctgtggattaagcggcagatagtgctgaccgagcaacataaaaaacagcaccgccagccccagcatgttcaggccgagaatggcacaaagatattgcttccagttcatctcacggtcagagacgccaagtgcgcgaaaaagtacgcgctcaacgcccgttgtaccgggaagaggaatgtcattaatcagccgcgccagcccgctgcctaaaggacgcgccagcaccattaacaccagtaaaaacgtggcgatcagtaagaacccttgcgcagccatcagaacgcctccgcattgatcagggcataaaccagataacccagtaataaaaacaccagcaatacgccggttatcacgcctgcactcacagtgcacctccagtggcctaaaagtgataccggaagggtagaattctggctgcaaagatttcgcaaaaatctgcgggcggggtgtaaaaaaagtataaaaatggcaaaagccatgatttaactaatgtttagtattaatttaacttttgtgtaacttaattacaggatgaatgtaaataaaccatcaataagcaaaaataagtggtcggatgagtagtaaaattacacaaaaggcggtactattttcatcagataaacaaattcatttttccggtgccattcaccgggtagatacaaaagggggagaaaagtatggaactctacagagaatatcctgcatggcttatctttttacgccgtacttatgcggttgcagcgggcgttctggcgctgcctttcatgcttttctggaaagaccgcgcccgcttttacagctacctgcatcgcgtctggtcgaaaaccagcgataaaccggtgtggatggatcaggccgaaaaggcaactggtgatttttattgattgctgagttttgaatacattgaaaaccgccagcggaaacgctggcggttttttgtatcaggaagatgttcagaggaatatttagacatcgttataccaatcgaaacatatattcatgaaatatatataaatattttcctaattgttcttatctgacagatatctcacttaaggctttcttataaatctgtagggtttcgcctgtcagcagacaaataacccgataaaacaaggatgagcagatgagcggaaaaccggcggcgcgtcagggcgacatgacgcagtatggcggtagcattgtccagggttcagccggggtacgcatcggtgcccccaccggcgtggcctgttcggtgtgccccggcggggtgacgtccggccatccggtcaatccgctgctcggtgcaaaggtccttcccggtgaaaccgacatcgccctgcccggcccgctgccgttcattctctcccgcacctacagcagttaccggacaaaaacgcccgcgccggtggggagcctcggccccggctggaaaatgcctgcggatatccgcttacagctgcgcgataacacactgatactcagtgataacggcggcagaagcctgtattttgagcacctgtttcccggtgaggacggttacagccgcagcgagtcactgtggctggtgcgcggcggcgtggcgaaactggatgaaggtcaccggctggccgcactctggcaggcgctgccggaagaactccgcttaagtccgcatcgttatctggcgacaaacagtccgcaggggccgtggtggctgctcggctggtgtgagcgggtgccggaagcggatgaggtgctgcctgcgccgctgccgccgtaccgggtactgaccgggctggtggaccgcttcgggcgcacacagacgttccaccgcgaagccgccggtgaattcagcggcgaaatcaccggcgtgacggatggtgccgggcgtcacttccggctggtactgaccacgcaggcgcagcgggcagaagaagcccggcagcaggccatttccggcgggacggaaccgtccgcttttcctgataccctgccgggttacaccgaatatggccgggacaacggcatccgtctgtctgccgtgtggctgacgcacgacccggaatacccggagaatttacctgccgcgccgctggtgcgctatggctggacgccccgcggcgaactggcggcggtgtatgaccgcagcaatacacaggtgcgcagctttacttacgatgataaataccggggccggatggtggcgcaccgtcacacgggccgaccggaaatctgttaccgttacgacagcgacgggcgggtgacagaacagctaaacccggcaggcttaagttacacgtatcagtatgagaaggaccgcatcaccatcaccgacagcctgaaccgccgtgaagtcctgcacacgcagggtgaaggcgggctgaagcgggtggtgaaaaaggaacacgcggacggcagcgtcacgcagagtcagtttgacgcggtgggcaggctcagggcacagacggatgccgcaggcaggacaacagaatacagtccggatgtggtgacgggcctcatcacgcgcatcaccacgccggatggcagggcatcggcgttttactataaccaccacagccagttaacgtcagccaccgggcctgacgggctggaaatacgccgggaatatgatgaatggggccgtctgattcaggaaactgcccctgacggcgatatcacccgctaccgttatgataatccacacagtgacttaccctgcgcaacggaagatgccaccggcagccggaaaaccatgacgtggagccgttacggtcagttgctgagcttcactgactgttccggttatgtaacccgctatgaccatgaccgttttggtcaggtgacggcggtgcaccgcgaggaagggctgagtcagtaccgcgcatacgacagccgtggacagttaattgccgtgaaagacacgcagggccatgaaacgcggtatgaatacaacgccgccggtgacctgaccaccgtcattgccccggacggcagcagaaacgggacacagtacgatgcgtggggaaaagccatctgtaccacgcagggcggtctgacgcgcagtatggaatacgatgctgccggacgggtcatccgcctgaccagtgaaaacggcagccacaccaccttccgttacgatgtactcgaccggctgatacaggaaaccggctttgacggccgcacacagcgttatcaccacgacctgaccggcaaacttatccgcagcgaggatgaggggctggtcacccactggcactatgacgaagcagaccgcctcacgcaccgcaccgtgaatggcgaaaccgcagagcggtggcagtatgacgaacgcggctggctgacagacatcagccatatcagcgaagggcaccgggtgacggtgcactatggttatgacagtaaaggccgcctcgccagtgaacacctgacggtgcatcatccgcagacgaatgaactgctctggcagcatgagaccagacatgcgtacaacgcacagggactggcgaaccgctgtataccggacagcctgcccgccgtggaatggctgacctacggcagcggctggctgtcaggcatgaaactcggcgacacaccgctggtggagtacacccgcgaccgcctgcaccgggaaacgctgcgcagcttcggccgttatgaactcaccaccgcttatacccctgccgggcagttacagagccagcacctgaacagcctgctgtctgaccgcgattacacctggaacgacaacggcgaactcatccgcatcagcagcccgcgccagacccggagttacagctacagcaccaccggcaggctgaccggcgttcacaccaccgcagcgaatctggatatccgcatcccgtataccacagacccggcaggtaaccgcctgcccgacccggagctgcacccggacagcgccctcagcatgtggccggataaccgtatcgcccgtgacgcgcactatctttaccggtatgaccgtcacggcaggctgacagagaaaaccgacctcatcccggaaggggttatccgcacggatgatgagcgcacccaccggtaccattacgacagtcagcaccggctggtgcactacacgcggacacaatatgcagagccgctggtcgaaagtcgctatctttacgacccgctgggccgcagggtggcaaaacgggtatggcggcgtgaacgggacctgacgggctggatgtcgctgtcacggaaaccgcaagtgacctggtacggctgggacggcgaccgcctgaccacgatacagaacgacagaacccgcatccagacgatttatcagccggggagcttcacgccactcatcagggttgaaaccgccaccggtgagctggcgaaaacgcagcgccgcagcctggcggatacccttcagcagtccggtggcgaagacggtggcagtgtggtgttcccgccggtgctggtgcagatgctcgaccggctggaaagtgaaatcctggctgaccgggtgagtgaggaaagccgccgctggctggcatcgtgcggcctgacggtggcgcagatgcaaagccagatggacccggtatacacgccggcgcgaaaaattcacctgtaccactgcgaccatcgcggcctgccgctggcccttatcagcacggaagggacaacagcgtggtacgcagaatacgatgaatggggtaacctgctgaatgaagagaacccgcatcagctgcagcagcttatccgcctgccggggcagcagtatgatgaggagtccggcctgtattacaaccgccaccgctattatgacccgctgcaggggcgatatatcactcaggatccgattgggctgaaagggggatggaatttttatcagtatccgttgaatccgatctcaaatatagatccattaggattagaaacactaaaatgcattaagccactgcattcaatgggcggaactggtgaaagaagcggtccagatatatgggggaatccgttctatcatcaatatctttgtgtcccagatggtaaaggggactatacttgtggtggccaagaccaacggggagaatcaaaaggagatggtctatgggggccaggtaaagcaagtaatgatacaaaagaagctgctggccgttgtgacctcgttgaaaccgataatagttgtgtggagaactgtttaaaagggaagtttaaagaggtaaggccgcgttattctgtattgcctgatatattcacacctataaatttagggctatttaaaaactgccaagactggtctaatgattctttagaaacatgtaagatgaagtgctccggaaataacattggacgttttattagatttgtattcaccggagtgatgtaatgaaatatattatttttttattcagagctatatggctggctttatcgcttttaatactattcttttccatgcatagactttcactattagactccactcgtgatgtgagcgagttaattagtctcatgtcttatggaatgatggtaatatgttttccaacaggcatagtattctttattgctctaatatttatagggactgtatcagacattattggcgtaaggattgatagtaagtatattatggcgataataatatggctttattttctgtcaggagggtatattcaatggtttgtattaagtaagcgcattataaacaaataaattaagttaattgctcttattattatatgtaacctgggcattgatatcccgtatgccacagacccggcaggtaaccgcctgcccgacccggagctgcacccggacagcaccctcagcatgtggccggataaccgtatcgcccgtgacgcgcactatctttaccggtatgaccgtcacggcaggctgacggagaaaaccgacctcatcccggaaggggttatccgcacggatgatgagcgcacccaccggtaccattacgacagtcagcaccggctggtgcactacacgcggacacaatatgcagagccgctggtcgaaagccgctatctttacgacccgctgggccgcagggtggcaaaacgggtgtggcgacgtgaacgggacctgacgggctggatgtcgctgtcacggaaaccgcaagtgacctggtacggctgggacggcgaccgcctgaccacgatacagaacgacagaacccgcatccagacgatttatcagccggggagcttcacgccactcatcagggttgaaaccgccaccggtgagctggcgaaaacgcagcgccgcagcctggcggatacccttcagcagtccggcggcgaagacggtggcagtgtggtgttcccgccggtgctggtgcagatgctcgaccggctggaaagtgaaatcctggctgaccgggtgagtgaggaaagccgccgctggctggcatcgtgcggcctgacggtggagcagatgcaaaaccagatggacccggtgtacacgccggcgcgaaaaatccacctgtaccactgcgaccatcgcggcctgccgctggcgcttgtcagcacggaaggggcaacagaatggtgcgcagaatacgatgaatggggcaacctgctgaatgaagagaacccgcatcagctgcagcagcttatccgcctgccggggcagcagtatgatgaggagtccggcctgtattacaaccgccaccgctattatgacccgctgcaggggaggtatatcactcaggatccgattgggctgaaggggggatggaatttttatcagtatccgctgaatccggttcagtatatagattcaatgggactggcatcaaaatatggacacttaaataatggcggatatggagcgagacccaacaaaccgcctacgcccgatccaagtaaattgccggacatagcgaaacaattaagactgccatatcctattgaccaggccagtagtgcgcctaatgttttcaaaacattcttcagagcattaagcccttacgactacacactgtattgcaggaagtgggtaaaaccaaatctgacttgtacgccacaggatgattcccagtatccagggatggatacaaagacagcaagtgattacctgccacagacaaattggccaacaactcaattaccaccaggatatacttgtgcagaaccctatttattcccagacattaataaacccgatgggccagcaacagcagggatagatgatttgggtgaaattttagctaagatgaaacagagaacatcgagaggaataagaaaatgaaaagagttttgttctttttgctgatgatatttgttagttttggtgttatagctgattgcgaaatacaagctaaagatcatgattgttttactattttcgctaagggtactattttttccgcgtttcctgtcttaaataataaagccatgtggagatggtatcagaatgaggacatcggtgagtattattggcaaacagaactgggtacatgtaaaaataataaattcacaccaagcggggcgagactcttaattcgcgtcgggtcactacgccttaatgaaaatcatgccatcaaaggaacgttgcaggagttgataaatacagcagaaaaaacggcgtttctcggcgatcggtttagaagttatataagagcgggtatctatcaaaaaaagagcagtgatccagttcagttgttggcagtccttgataattcaatcatggtaaaatattttaaagatgagaaaccaacttatgctcgaatgacagcacatctcccgaacaaaaatgagtcttacgaatgtttaataaagatacagcatgaactaattcgtagtgaagagaaataaaatctcttcctgagaaaacaaattaatcattgtgaaaaattatataactcatggaataggtgtttattttgcgttccatttgcagggaaagatcacgtaacgctacttttttgtactaaataattcgaattttaagttcaacaattgagatactacttattgtctaaagctgtttttcatagcttatacatgatcaaatactccttacataaataaggtgaacaaatggaacttaaaaaattgatggaacatatttctattacacccgattacagacaagcctggaaagtggtgcataaattgtcagatattctactgttgactatttgtgccgttatttctggtgcagaaggttgggaagatatagaggatttcggggaaacacatctcgattttttgaagcaatatggtgattttgaaaatggtattcctgttcacgataccattgccagagttgtatcccagggaaagatcacgtaacgctacttttttgtactaaataattcgcattttatgtttaaaaattgagatattccttattacctaaagctgtttttcatagcttatacatgatcaaatactccttacataaataaggtgaacaaatggaacttaaaaaattgatggaacatatttctattattcccgattacagataagcctggaaagtagagcataaattgtcaggcatcctactattgactatttttgccgttatttctggtgcagaaagttgggaagatatagaggatttcggggaaacacatctcgatttcttgaagcaatatggtgattttgaaaatggtattcctgttcacgatactattgccagagttgtatcctgtatcagtcctgcaaaatttcacgagtgctttattaactggatgcgtgattgccattcatcaaatgataaagacgtcattgcaattgatggaaaaacgctccggcactcttatgacaagagtcgccgcaggggagcgattcatgtcattagtgcgttctcaacaatgcacagtctggtcatcgggcagatcaagacggataagaaatccaatgagatcacagctatccctgaacttcttaacatgctggatattaaaggaaaaatcatcacaactgatgcgatgggttgccagaaagatattgcagagaagatacaaaaacagggaggtgattatttattcgctgtaaaaggaaaccaggggcggcttaataaagcctttgaggaaaaatttccgctgaaagaattaaataatccagagcatgacagttacgcaatgagtgaaaagagtcacggcagagaagaaatccgtcttcatattgtttgcgatgtccctgatgaacttattgatttcacgtttgaatggaaaggactgaagaaattatgcgtggcagtctcctttcggtcaataatagcagaacaaaagaaagagccagaaatgacggtcagatattatatcagttctgctgatttaaccgcagaaaagttcgccacagcaatccgaaaccactggcacgtggagaataagctgcactggcgtctggacgtggtaatgaatgaagacgactgcaaaataagaagaggaaacgccgcagaattattttcagggatacggcacatcgctattaatattttaacgaatgataaggtattcaaggcagggttaagacgtaagatgcgaaaagcagccatggatagaaactatctcgcgtcagtccttgcggggagcgggctttcgtaatctttccctgctttttgtactaaataattcgcattttatgtttaaaaattgagatattccttattacctgaagctgttttttattgcttatacatgatcaaatacttcttacataattaaggagaacaaaatggaacttaaaaaattgatggaacatatttctattatccccgattacagacaagcctggaaagtggaacataaattatcggatattctactgttgactatttgtgccgttatttctggtgcagaaggctgggaagatatagaggattttggggaaacacatcccgattttttgaagcaatatggtgattttgaaaatggtattcctgttcacgataccattgccagagttgtatcctgtatctgtcctgcgaaatttcatgagagctttattaactggatgcttgactaccattcttcagatgataaagacgtcatcgcaattgatggaaaaatacaccggcattcttatgacaagagtcgccgtaagggagcgattcatgtcattagtgcgttctcaacaatgcacagtctggtcatcggacagatcaagacggataagaaatccaatgagatcacagctatccctgaacttcttaacatgctggatattaaaggaaaaatcatcaaaaccgatgcgatgggttgccagaaagatattgcagagaagatacaaaaacagggaggtgattatttattcgctgtaaaaggaaaccaggggcggctaaataaagccttcgaggaaaaatttccgctgaaagaattaaataatcccaagcatgacagttacgcaattagtgaaaagagtcacggcagagaagaaacccgtcttcatattgtttgcgatgtccctgatgagcttattgatttcacgtttgaatagaaagggcagctatggttagaaactacctgacgtcagtccttgcggggagcaggctttcgtaaatttgtcctgctacaacaggattaacttcacaaatatcatttctcaacgtctacacttactcctgtaaaccgctcaggagcagtaatgaatctacaacgatttgatgacagcaccctaatccgtatctttgcccttcatgagttacatcgactgaaagaacatggcttaacgcgcggggcgcttctcgattatcacagccgctataaactcgtctttctggcgcattctcagccggagtaccgcaaacttggcccgttcgtggctgatattcaccagtggcaaaatctggatgactattacaaccagtaccgccaacgcgtagttgttttgctttctcaccccgccaacccgcgcgatcacaccaatgttttgatgcacgttcagggttattttcgcccgcatattgattccacagaacgccagcagctggctgcgcttatcgacagttatcgccgtggcgagcaaccacttcttgcgccgctgatgcgtatcaaacactatatggcgctttatcctgacgcctggctttcagggcagcgttatttcgaactttggccgcgtgtgattaacttgcgccattcaggagttttatgactacccatctggtctggtttcgccaggatttacgtctgcacgataatctcgcactggctgccgcctgccgcaattcgtctgcacgcgtgctggcgttgtatatcgctacaccacgccagtgggcgacgcataacatgtcgccgcgtcaggctgaacttatcaatgctcaactgaatgggctacaaatagcgcttgcggaaaaaggtattcctttattgttccgtgaagtggatgactttgtcgccagtgtcgaaatagttaaacaggtgtgcgcggaaaacagcgttacccacctgttttataactatcagtatgaagtgaatgagcgggcgcgggatgtggaagttgaaagagcgctgcgtaacgtggtgtgtgaaggatttgatgacagcgtgatcctgccgcctggcgcggtgatgaccggtaatcacgagatgtacaaagtctttacgccttttaagaatgcctggctgaaacggctgcgggaagggatgccggagtgcgtcgctgcgccaaaagttcgtagtagcggatcgatagagccctcgccatccattacgctgaattatcctcgtcagtctttcgatactgcgcattttccggtggaagaaaaagcggcgattgcgcaattacgccagttttgccagaacggtgccggagaatatgagcaacaacgagattttccggcagtggaaggcaccagccgtttgtcggccagcctggcaacgggcgggttatcgcctcgccagtgcttgcatcgcttgttggctgaacagccgcaggcgctggacggtggggccggtagtgtctggcttaatgagctgatctggcgcgagttttaccgtcacctgataacgtatcacccctcgttgtgtaaacatcgtccatttattgcctggacggatcgtgtacagtggcagagcaatcccgcacatttacaggcctggcaggaaggcaaaacgggatacccgattgttgatgccgctatgcgtcagcttaacagcactggctggatgcataacaggctacggatgattacagccagttttctggtgaaagatttattgatcgactggcgcgaaggcgagcgatatttcatgtcgcagctgattgatggtgatttggcagccaataacggtggctggcagtgggccgcttcaaccggaaccgatgcagcgccgtattttcgtattttcaacccgacaacccagggcgagaaatttgatcatgagggcgagtttatccgccagtggctaccggaactgcgcgatgtgccagggaaagtggtgcatgagccgtggaagtgggcgcagaaagcaggtgtgacgctggattatccgcaaccgatagtcgagcacaaagaagcgagagtacaaacgttggcagcgtatgaggcggcgcggaaggggaaataacagacgcgtcaggcaatcgagcccagatgccggatgcggcgtgaacgccttatccagcctacaaatttgtgcaaattcaataaattgcaggaaatacgtaggcctgataagacgcgtcaagcgtcgcatcaggcatcggtgctggcctattaagactccagcgccagcgcgcggtttctgaatttcagcgcctgatacagccaaatcatcagtaccagtcctacacacgccagtgcgccccaggtaatttgatcaaatacttcaatatatgcattgatggagtagttgatcgccccggaagcatcaaacgaagcctgcgatgtctgatcggcaatcacgcccgccagatagttcgcgatcgcgccagaaagcagcatgtagatgccggttaatacgccggtcacaccggggatttcaatgcgcgtaatttgcgacatggcaaccgggtcgataaacagttccgcaaagcccatcaccgccaggcctaataccatcagtggcagagaagagtgaccatacattgcggaccagcgggcgcttaaggtcagaatgcagaatccggcgctcatcaggccaaggccaagagcaaatttcccccagatgcgcacggtacgattacccgcgacactctcttttaccacccacgccaggaacacaccgcacagcataactgcgaaggcattaatcgactggaacatcgcggtcggaacggtataaccaaacatatcgcggttaacgaagcggtcgatataaaggctaatcgagctaccgccctgttgtgcgaaggcccagaacaacatactgaagaaggtgagcgtcacaatcagccccagctccttccgctgtttctggttttctgctttgcgataaatttttgccagtacacccaggccaataatagtcgcgacaattaaggcgtataccgaccactctttccagaacagtatggtaatcagtgcaggcgttgccaccagcagaaccagcagccatccccagttcggcaggagaaagtttgtcgcacgcagtacttttttgttaacgccgcgggtatgagtgaaatgacgattgccacataagaaaatgaccagacccgcgatcatgccaaccgccgccaggccaaagcccatcgcccagctgtactcttcctgggcgtaaccacaggcgataggtgcgataatagaccccacgttacccgccgcatacatcagcgagaaaccgccatcacgacgcggatcggttggctcatacagctcgccgagcagacagcttacgttagatttaaacaggccatagccgcagacgataatcgccagggacagatagaggaatgacggatggatctcactggcacccagcaccacatgaccgatcgccatcaacaacgcccccagcatcaccgccatgcgattgccgagaactttatccgccaaaaagccaccgaggattggcgtgacatacaccagcgaacagtaggcgctaaataactcgtaggcgtgagtatcgttgtattttagttgattggtgagatagagaatcagcagggcacgcatgccgtaaaagctaaaatattcccagatttgcagcgcaacgacatagtaaatagcgcgcggctgtgatgcgtgtttattcataataattccacaattgacggcaacgtcacgtaatagttgcgcggcgtgcttgtgtttccttaaagttaaaactttgatacagatctgattatttatgcaatatgctgtctgattgcataaatatacattagctgaagcgtgatgatataaacaatttgcgtcttttggcgtcgggtttgtttcttaatatgtcaaaagattggctatcgacgaactggcgaggtaacgctatgttaacggtgtagctatcagaatacggaaggcgcgaagatgaaaaacaccgaactggaacaactgattaacgaaaaactgaacagcgcggcgattagtgattacgcgccgaatggtttgcaggtggaaggcaaagagacggtgcaaaaaattgttaccggtgtcaccgccagccaggctttgctcgatgaggcagtgcgtctgggcgcggatgcggtcattgtgcatcatggctacttctggaaaggagagtctccggtcattcgcggaatgaagcgtaaccgtttaaaaacgttgctggcgaatgatatcaacctgtatggctggcatttgccgcttgacgcacatcctgagctgggcaataacgcacagctggcggcgttactggggatcacggtcatgggcgaaattgagccgttggtgccgtggggcgaactgaccatgcctgtgccgggactggagctggcttcctggattgaagcgcgtctgggacgtaagccgttatggtgtggcgataccggacctgaggtggtccagcgcgtcgcctggtgcacgggcggcgggcaaagttttatcgatagcgccgcgcgttttggcgtggatgcttttattactggcgaagtttctgaacagaccattcattcagcccgcgagcagggattgcatttttatgctgcaggtcaccatgccactgaacgtggtggtattcgcgcattgagcgagtggctgaatgaaaataccgatcttgatgtgacctttattgatattcctaatcctgcataacgaataatcagagggatcgaaagtgcaacgagcgcgttgttatctgataggtgaaacggcggtagtgctggaactggaaccgccggtgacgctggctagccagaaacggatctggcgactggcgcagcgtctggtggatatgccgaatgtggttgaagccattcccggcatgaacaatatcacggtgattttgcgtaatcctgagtcgctggcgctggatgccatagagcgtttgcaacgctggtgggaggagagcgaggcgctggagccggagtctcgctttattgaaattccggtggtttacggtggtgcaggcggaccggatttggcggtggtcgcggcgcattgcgggttgagcgaaaaacaggttgttgaattgcactcctccgtggaatacgtggtctggtttttaggttttcaaccgggcttcccgtatctcgggagtttgccggaacaactacacacgccacggcgcgctgaaccgcgcttactcgttccggcaggttctgtcgggatcggcgggccgcagactggtgtttatccgctggcaacgccgggtggctggcagttgattggtcatacctcactcagcctgtttgatccggcgcgtgacgaacccatcttattacgtccgggagacagcgtgcgctttgtaccgcagaaggagggagtatgctgaagattattcgtgcgggcatgtataccactgtgcaggatggcggtcgtcacggttttcgccagtcgggtatcagccactgcggcgcactggatatgcccgcgttacgcattgctaacctactggtgggtaatgacgccaatgcccccgcgctggagatcacgctcggtcagttaactgttgagttcgaaactgatgggtggtttgctctgacgggtgccggttgcgaagcgcggctggatgataatgccgtctggaccggctggcgattgccgatgaaagcaggccagcgtttaacgcttaaacgcccgcagcacgggatgcgcagttatctggcggtcgcgggtggtattgatgttccgccggtaatgggctcatgcagcaccgatctcaaagtggggattggcgggctggaaggccgtttactgaaggatggtgaccgactcccgattggcaaatcgaagcgtgattctatggaagcgcagggcgttaaacagctgctgtggggcaaccgcattcgcgccttgccggggccggaatatcatgagttcgatcgcgcctcgcaggatgcattctggcgttcgccctggcagcttagctcgcaaagtaaccgcatgggctatcgcttacaggggcaaattttaaaacgcaccaccgatcgcgaactgttatctcacggtttgttaccgggcgtggtgcaggtgccacataacgggcagccgattgtgttgatgaacgacgcacagaccaccggtggttacccgcgtattgcctgtatcattgaggctgatatgtaccatctggcgcaaattccgctcggtcagccgattcattttgtccagtgttcactggaagaggcactaaaagcacggcaagatcagcaacgttattttgaacaattagcgtggcggctgcacaatgaaaattgacctgaacgccgatctgggcgaaggctgcgccagcgacgcagagctattaacgctggtttcctctgccaatattgcctgtggatttcatgcaggcgatgcgcaaatcatgcaggcttgcgtgcgtgaagcaataaaaaatggtgtcgcgattggcgctcacccgagttttcccgacagggaaaattttggtcgcagcgccatgcagctgccgccagaaaccgtttacgcccagacgctgtatcaaattggcgcgctggcaacgattgcccgtgcgcaaggcggcgtaatgcgtcatgtcaaaccgcacggcatgttgtacaaccaggcggcgaaagaagcacaactggcagacgccatcgccagagcggtatacgcttgcgatccagcattgattctcgtcgggctggcgggaagcgagctgattcgtgcaggcaagcaatatggtctgacaacgcgcgaggaagtgtttgccgatcgcggttatcaggctgacggctcgctggtgccgcgaagccagtcaggcgcgttgattgaaaacgaagaacaggcgctggcgcaaacgctggagatggtgcaacacggcagagtcaaaagtatcaccggcgaatgggcaacggtcgcggcgcaaacggtctgcctgcatggcgacggcgagcacgcactggcgttcgcccgccgactacgctctgcatttgccgaaaaggggattgttgtcgcagcataaccccgattaataaagaatgaaaaaaggatatcaccatgcctgaaggcccggagatccgccgtgcagcggataacctggaggcggcgatcaaaggcaaaccactaactgatgtctggtttgccttcccgcagttaaaaccttatcaatcacaacttatcggtcaacacgttacccatgtggaaacgcgtggtaaggcgttgttaactcatttttccaacgacttaacgctctacagccataatcagctttacggcgtctggcgcgtggttgataccggcgaagagccgcagaccacgcgagtattgcgggtaaaactgcaaacggctgacaaaaccattctgctttatagcgcctcggatattgagatgttgaccccggaacaactgaccacgcatccgtttttacaacgcgttggtcccgatgtgctggatccgaatctgacgccggaggtggtgaaagaacgattattgtcgccgcgctttcgtaaccgtcagtttgctggattactgctcgatcaggcgtttctggctgggcttggcaattatttgcgggtggagatcctctggcaggttgggttgactggaaatcataaagcgaaagatctcaatgcggcgcaactggatgcactcgcacacgcgttactggagattcctcgattttcctacgctacgcgggggcaggtggatgagaataagcatcatggggcgctgtttcgctttaaggtttttcatcgagatggcgaaccgtgcgaacgttgtggcagcatcattgagaaaaccacgctgtcatctcgcccgttttactggtgccctggctgccagcactaggccgaccgcttcggcgcataggttgaaataaaccgcgcaatggcaggccctgtcagcaaaatactgaacaggcgtagggtttgcatcgccataatgagcgccatatcggcattgctccctgcggcgatgaccgccacggtatcaagcccgccggggctggtggcgaggtaggcagtcataaaatcaatgtgcataaaccgggtcagcccccacgccatacccgcacaaatagccagcagagcaaaaatcgacagcaggatttgcggtagcgggcgtagtgcccgcagtaagatttgtttatcgaaaccaagaccaatccgccagccaattgccatatacgccatcgccagcagccattccggtagttcgatggtgatgagctgaccagactggagcactgcgcccgccagcatcgggatgagcatcgtgccggaaggaagacgcagcaggcatcccactgtaccggcaacgaccgcgagcaaaatagtaagcaggagattaatgctcactggcgggaaccagacgatatgctggttaaccgcttcagcgttatcgcccagcatcatgcgggtgaccagaacagcggcccccgcgacgaacagcactcgcagatattgcataaacgccaccaggcgaatatctgcgccgtaatcttgcgccatagcgaccattgccgccgcgccgccaggagaggagccccaggcaccggtatttccaggcaatgagctatagcgcaccaataaccaacccacaatggcgctggaaagcagcgttaccagtaaaattgcaagcacgatcggccagttgacggccagggtggtgagaatcgaaccagtgaggttttgcgcaatcatgcagccaagaatggcctgggcggcgagaaaagcagagcggggaagttgcagagtaattccgcgcatactaaagatgatcccggcgatcatcggcccaagtaatagcgccgccgggagatgtaccgcgaggaaaccaatagaaaggagaagtgatagcacacataacattccccactgcaaaactggcatccttcgctccctcattattttctctttggtgtatcgatacagcataaagaaagctgggccaggaaaaaataacagcaatcaaggaaaaggggaaaatcagcaattttctgaaagagatgccctttccggcggcaaagggcatcatggtaaatcagttatagttaatcttaaaaagcaccactgtatcgaaggggccagcctcgatgggggtgcctggaatggacgaaagttcagccgtataggttttttcgtagaccaacatgtcactggtgaaatcggcgtattcagcatatttattgaaggtataaggcgaggcgttttcatccagtaaacgtagcttcagaccattaccaatcaacaatgctttatcttcttcaaccaacgtttcttcggtataaaaggaggaactgactttaaatccgtcggtgcattgatcgttttggctcttggtcgttttaatactgaacgttttcgacattgtgtggcgacgtatatccagcaaattaaatttaccaaaatcaatcacctgtgtttccggtgaaatggaaaaattgacgctgcaatccagcacgcgaatgttttccagaccagtaatatgatatttcaggttttgggcagtagggtcttcgttaacgctaccggcaccgtcaaattgcacgacgatatagtcgctaagcgtactttgataatcatgcggcggcatttctcgtattttgacgtataaccgcatgcgagcgagaaaggtacgcgacatatgaatattagcgggatcgcccgagcaaattttgttctgccatcccatcgcgatgatctgctcaggggtataaatatcaatgttcttactgtcgatacactggttagtgtcgatgcgactttttcccagactggcatcgtaatcgacaccgttgtatgtcacgccgagttgataataacgatcctgcacccccggataggggtttacccaggcgtagacatgctcgctttcaaagttgccgttggtattgttgtcacaatagacgggaattttaatatcgtcagattcccagatcttatcaccgggtttggcattgcctggtacagcaaacggttgaatcgcttctgatttttctactgcgccaccagatgtaccaaaatagcagttcagcgccattgcagacttcaacggcagaaataacaggcagatgacgagcaacaatcccttgccagcactcatttcgcctccactgcttgtaaacggcattgtccgctgcagttgagcgtcgtcatgcgtaatgcgccgtaatcatccatgtaaccgagataaaactggctgccgctataacttccggtgtttgtgttgaccgtactaaaaggtgcaaccatcacggttttgaagcctgggagaacgcctttttcatttctccccagataggcaatggtcagataatacgcggtaggatttttcagtgtcagttggttgccctgctggctgacctgtaactgcagttcgaccttttctcctgctttcttgcgtaatgcagccggtcgccagaacaatttaatacgactttgaatagcgacctgaagtatcgcatggtcgctgcttttatccggagcgggaggaatttcgcgcatattgtagaaaaatagcgtttcgcgatcgccaggtaattgtgtggttgaggcttgtttcacaacccgcacctgcgatgtcgctttcggttccagacgttgaatagggggcaaagcgaccagaagagcatcgcttttctcccctttttcattttctatccaggaataagcaagataaggcagtttgtcactttggttttcgatacgcaggctggtggctttgtcattggcgttaaacacaatgcgtgtgcgatcgggttgcaccgcagcattgcaacccaagctgatggttaacaacattaagggtaatcctttaataaatgtcattctcttttccttaattaatgacaaggtaaaatcaggcgtttggtcgtgtcttccagacgttctggcagatgaataatgcagctttgctcaccccagaccacggtaaacagttgattttcagcgacaccgcttaaccaggcatgtccttcctcgccaaccatacccacgctaatgccgctgtcatcctggcggatatccgcaccgaggggagggaactgaccgctggcgttgcgtatgatgacgttaacgtctttaccggaacgggaagccagtgatttgtaacctatcgcgccttcaatccatgtttccttgatgacgttttctgcaactgttacgccgtcgggtaagtcattcatgttcaccgccacggtggaaggctggtaactggaaatcaacggcaccaccgcaatgccaaaatggttggtgtagtcgagattgccctgaaccggaatatctgccacgccatcggtgctgaccatcaggcgtggttcattggtggagctgcggcgatgaaatgctgcaccatattgggttgcggtgaaagaaccgctccagctgctgctgacggaactgtaatcactggcggcataggtaccagaaatatcccactcacccgctgaactcaggtgctgatagttaccgctcacctgggctccattgtccggacgatcggattgcagtccggcagacatgccccagctattacgttcatccagcgtatcgttccacgacatgcggtgtatggtgctgtggctactgttttgcatgtcatagccaacccgaccaccgttaccgaaggggagcgaaatcgacagataaatctggttgtcgcgatctttatcttcgtagtgggtcgtattgaatgacgtcgaaatcgagatatctctccagtcaccaatatcaacattaaaacctgctgtgatgttggcggtcgtggaggcgtctgcattccaccaggtttgatgtagcaggttggcgtaaagattgaggtttagtggggtaatcggttggcccacggataagctgatcgtctgtttttcgtcctgcgcatcgctgtcgttgtatttgtgatccagatagttggcgtagctgtgaaaatgacgatctgagaagcgataagcggcgagcgaaatcgtgctgttggtggcatccacttgtttgctgtaattaaaacggtagcttaagccccgctcgtcctgctgagtatcaaaatggctactggcccaggtgacatcaaaggacagtgcgccaagccacagcatattttgcccgatacccattgcggcagaatggtagtcatcatcagaaatcagcaggccgccgtacagcgaggtgtttgagagcatcccccaggaaacttcattgctaaaaaaggtttcattttcagtttgatgtgacatggaaggccgtggctgacccgcggccaatttatagcgaacctgtccctggcgagtcaggaagggcgtcgatgctgccgaaacctggaaattgttcacccgaccatcttcttccgtcactttgacatccagcgtgccctgaacagactgattgaggtcatcaataataaacgggcctggcgggacttttttctggtaaatgacgcggcctgattgactgatcgtcaccgtggcattggtctgtgcaataccgctaatttgtggggcgtagccacgcagctcccacggtaacattcgatcgtcactcgccagtgccgcgccggtataagaaaaaccatcgaaaatattggaactgaaatcggtttcgccgagggttaacttagagcctaattgcggtaatggacgaaaaagataggtgcgcgatattccgcctgactggtcatggttatcttcgctatcggtcttattaagctggtaatcactgcgtaagcgccatgccccggcgttaattccggcggtaccgtaggcattcaggttagtgctgctgctgccgtcctgtgggcggtagctgctggcaaacaagttgtaatccatcaggacaccggcaacaccttctttccatgtagaggggggagcccagttttctgagtgccacgccagccaggcttgcggaatactaatattcagttgctgattggcttgatcgaaattgaagagcatttcaggtcgggaactgaaatcaatacaccgatctatctgtggcaaggactgacggatatctggttttaaaccaaatttatcgaccagtgaatcattgatgcatggaatggttttgtcaccctttttttgccagttaattttttgcccattactgattttgttgttattcaccgcaacgctaacaaaatattcaccgggagcaatgactcctttttcctttaataatgaaatatcaatgcggtcgcgcattgatttatcgagaacattcagattgaattcgaccgccattgcgcaaggcatcgccatgaccaggcaggatacaaaagagagtcgataaatattcacggtgtccatacctgataaatattttatgaaaggcggcgatgatgccgccaaaataatacttatttataatccagcacgtaggttgcgttagcggttacttcacctgccgtgacatcgactgcattatcaatttgttccatccaggcgaaaaagttcagcgtctgttctgatgagcttgcatccaggtcaagatctggcgcggctgaacctaatacgatgttaccgtcatttttgtccatcagtcgtacaccgaccccagttgcttcgcctgcactggtgttgctcaacaaaggcgtagcaccagttgtcttagccgtgctatcgaaggttacgccaactttggataccggcattccgctaccgttgtcagaagcaggcagatcacagttgatcaagcgaatgtcgacggccactttattgctatgatgctcccggtttatatgggttgtcgtgacttgtccaagatctatgtttttatcaatatcttctggatgaatttcacaaggtgcttcaataacctcccccttaaagtgaatttcgccagaaccttcatcagcagcataaacaggtgcagtgaacagcagagatacggccagtgcggccaatgttttttgtcctttaaacataacagagtcctttaaggatatagaataggggtatagctacgccagaatatcgtatttgattattgctagtttttagttttgcttaaaaatattgttagttttattaaatgcaaaactaaattattggtatcatgaatttgttgtatgatgaataaaatataggggggtatagatagacgtcattttcatagggttataaatgcgactaccatgaagtttttaattgaaagtattgggttgctgataatttgagctgttctattctttttaaatatctatataggtctgttaatggattttatttttacaattttttgtgtttaggcatataaaaatcaacccgccatatgaacggcgggttaaaatatttacaacttagcaatcaaccattaacgcttgatatcgcttttaaagtcgcgtttttcatatcctgtatacagctgacgcggacgggcaatcttcataccgtcactgtgcatttcgctccagtgggcgatccagccaacggtacgtgccattgcgaaaatgacggtgaacatggaagacggaatacccatcgctttcaggatgataccagagtagaaatcgacgttcgggtacagtttcttctcgataaagtacgggtcgttcagcgcgatgttttccagctccatagccacttccagcaggtcatccttcgtgcccagctctttcagcacttcatggcaggtttcacgcattacggtggcgcgcgggtcgtaatttttgtacacgcggtgaccgaagcccatcaggcggaaagaatcatttttgtctttcgcacgacgaacaaattccggaatgtgtttaacggagctgatttcttccagcattttcagcgccgcttcgttagcaccgccgtgcgcaggtccccacagtgaagcaatacctgctgcgatacaggcaaacgggttcgcacccgaagagccagcggtacgcacggtggaggtagaggcgttctgttcatggtcagcgtgcaggatcagaatacggtccatagcacgttccagaatcggattaacttcatacggttcgcacggcgtggagaacatcatattcaggaagttaccggcgtaggagagatcgttgcgcgggtaaacaaatggctgaccaatggaatacttgtaacacatcgcggccatggtcggcattttcgacagcaggcggaacgcggcaatttcacggtgacgaggattgttaacatccagcgagtcgtgatagaacgccgccagcgcgccggtaataccacacatgactgccattggatgcgagtcgcgacggaaagcatggaacagacgggtaatctgctcgtggatcatggtatgacgggtcaccgtagttttaaattcgtcatactgttcctgagtcggtttttcaccattcagcaggatgtaacaaacttccaggtagttagaatcggtcgccagctgatcgatcgggaaaccgcggtgcagcaaaataccttcatcaccatcaataaaagtaattttagattcgcaggatgcggttgaagtgaagcctgggtcaaaggtgaacacaccttttgaaccgagagtacggatatcaataacatcttgacccagcgtgcctttcagcacatccagttcaacagctgtatccccgttgagggtgagttttgcttttgtatcagccatttaaggtctccttagcgccttattgcgtaagactgccggaacttaaatttgccttcgcacatcaacctggctttacccgttttttatttggctcgccgctctgtgaaagaggggaaaacctgggtacagagctctgggcgcttgcaggtaaaggatccattgatgacgaataaatggcgaatcaagtacttagcaatccgaattattaaacttgtctaccactaataactgtcccgaatgaattggtcaatacttccacactgttacataagttaatcttaggtgaaataccgacttcataacttttacgcattatatgcttttcctggtaatgtttgtaacaactttgttgaatgattgtcaaattagatgattaaaaattaaataaatgttgttatcgtgacctggatcactgttcaggataaaacccgacaaactatatgtaggttaattgtaatgattttgtgaacagcctatactgccgccaggtctccggaacaccctgcaatcccgagccacccagcgttgtaacgtgtcgttttcgcatctggaagcagtgttttgcatgacgcgcagttatagaaaggacgctgtctgacccgcaagcagaccggaggaaggaaatcccgacgtctccaggtaacagaaagttaacctctgtgcccgtagtccccagggaataataagaacagcatgtgggcgttattcatgataagaaatgtgaaaaaacaaagacctgttaatctggacctacagaccatccggttccccatcacggcgatagcgtccattctccatcgcgtttccggtgtgatcacctttgttgcagtgggcatcctgctgtggcttctgggtaccagcctctcttcccctgaaggtttcgagcaagcttccgcgattatgggcagcttcttcgtcaaatttatcatgtggggcatccttaccgctctggcgtatcacgtcgtcgtaggtattcgccacatgatgatggattttggctatctggaagaaacattcgaagcgggtaaacgctccgccaaaatctcctttgttattactgtcgtgctttcacttctcgcaggagtcctcgtatggtaagcaacgcctccgcattaggacgcaatggcgtacatgatttcatcctcgttcgcgctaccgctatcgtcctgacgctctacatcatttatatggtcggttttttcgctaccagtggcgagctgacatatgaagtctggatcggtttcttcgcctctgcgttcaccaaagtgttcaccctgctggcgctgttttctatcttgatccatgcctggatcggcatgtggcaggtgttgaccgactacgttaaaccgctggctttgcgcctgatgctgcaactggtgattgtcgttgcactggtggtttacgtgatttatggattcgttgtggtgtggggtgtgtgatgaaattgccagtcagagaatttgatgcagttgtgattggtgccggtggcgcaggtatgcgcgcggcgctgcaaatttcccagagcggccagacctgtgcgctgctctctaaagtcttcccgacccgttcccataccgtttctgcgcaaggcggcattaccgttgcgctgggtaatacccatgaagataactgggaatggcatatgtacgacaccgtgaaagggtcggactatatcggtgaccaggacgcgattgaatatatgtgtaaaaccgggccggaagcgattctggaactcgaacacatgggcctgccgttctcgcgtctcgatgatggtcgtatctatcaacgtccgtttggcggtcagtcgaaaaacttcggcggcgagcaggcggcacgcactgcggcagcagctgaccgtaccggtcacgcactgttgcacacgctttatcagcagaacctgaaaaaccacaccaccattttctccgagtggtatgcgctggatctggtgaaaaaccaggatggcgcggtggtgggttgtaccgcactgtgcatcgaaaccggtgaagtggtttatttcaaagcccgcgctaccgtgctggcgactggcggagcagggcgtatttatcagtccaccaccaacgcccacattaacaccggcgacggtgtcggcatggctatccgtgccggcgtaccggtgcaggatatggaaatgtggcagttccacccgaccggcattgccggtgcgggcgtactggtcaccgaaggttgccgtggtgaaggcggttatctgctgaacaaacatggcgaacgttttatggagcgttatgcgccgaacgccaaagacctggcgggccgtgacgtggttgcgcgttccatcatgatcgaaatccgtgaaggtcgcggctgtgatggtccgtgggggccacacgcgaaactgaaactcgatcacctgggtaaagaagttctcgaatcccgtctgccgggtatcctggagctttcccgtaccttcgctcacgtcgatccggtgaaagagccgattccggttatcccaacctgtcactacatgatgggcggtattccgaccaaagttaccggtcaggcactgactgtgaatgagaaaggcgaagatgtggttgttccgggactgtttgccgttggtgaaatcgcttgtgtatcggtacacggcgctaaccgtctgggcggcaactcgctgctggacctggtggtctttggtcgcgcggcaggtctgcatctgcaagagtctatcgccgagcagggcgcactgcgcgatgccagcgagtctgatgttgaagcgtctctggatcgcctgaaccgctggaacaataatcgtaacggtgaagatccggtggcgatccgtaaagcgctgcaagaatgtatgcagcataacttctcggtcttccgtgaaggtgatgcgatggcgaaagggcttgagcagttgaaagtgatccgcgagcgtctgaaaaatgcccgtctggatgacacttccagcgagttcaacacccagcgcgttgagtgcctggaactggataacctgatggaaacggcgtatgcaacggctgtttctgccaacttccgtaccgaaagccgtggcgcgcatagccgcttcgacttcccggatcgtgatgatgaaaactggctgtgccactccctgtatctgccagagtcggaatccatgacgcgccgaagcgtcaacatggaaccgaaactgcgcccggcattcccgccgaagattcgtacttactaatgcggagacaggaaaatgagactcgagttttcaatttatcgctataacccggatgttgatgatgctccgcgtatgcaggattacaccctggaagcggatgaaggtcgcgacatgatgctgctggatgcgcttatccagctaaaagagaaagatcccagcctgtcgttccgccgctcctgccgtgaaggtgtgtgcggttccgacggtctgaacatgaacggcaagaatggtctggcctgtattaccccgatttcggcactcaaccagccgggcaagaagattgtgattcgcccgctgccaggtttaccggtgatccgcgatttggtggtagacatgggacaattctatgcgcaatatgagaaaattaagccttacctgttgaataatggacaaaatccgccagctcgcgagcatttacagatgccagagcagcgcgaaaaactcgacgggctgtatgaatgtattctctgcgcatgttgttcaacctcttgtccgtctttctggtggaatcccgataagtttatcggcccggcaggcttgttagcggcatatcgtttcctgattgatagccgtgataccgagactgacagccgcctcgacggtttgagtgatgcattcagcgtattccgctgtcacagcatcatgaactgcgtcagtgtatgtccgaaggggctgaacccgacgcgcgccatcggccatatcaagtcgatgttgttgcaacgtaatgcgtaaaccgtaggcctgataagacgcgcaagcgtcgcatcaggcaaccagtgccggatgcggcgtgaacgccttatccggcctacaagtcattacccgtaggcctgataagcgcagcgcatcaggcgtaacaaagaaatgcaggaaatctttaaaaactgcccctgacactaagacagtttttaaaggttccttcgcgagccactacgtagacaagagctcgcaagtgaaccccggcacgcacatcactgtgcgtggtagtatccacggcgaagtaagcataaaaaagatgcttaagggatcacgatgcagaacagcgctttgaaagcctggttggactcttcttacctctctggcgcaaaccagagctggatagaacagctctatgaagacttcttaaccgatcctgactcggttgacgctaactggcgttcgacgttccagcagttacctggtacgggagtcaaaccggatcaattccactctcaaacgcgtgaatatttccgccgcctggcgaaagacgcttcacgttactcttcaacgatctccgaccctgacaccaatgtgaagcaggttaaagtcctgcagctcattaacgcataccgcttccgtggtcaccagcatgcgaatctcgatccgctgggactgtggcagcaagataaagtggccgatctggatccgtctttccacgatctgaccgaagcagacttccaggagaccttcaacgtcggttcatttgccagcggcaaagaaaccatgaaactcggcgagctgctggaagccctcaagcaaacctactgcggcccgattggtgccgagtatatgcacattaccagcaccgaagaaaaacgctggatccaacagcgtatcgagtctggtcgcgcgactttcaatagcgaagagaaaaaacgcttcttaagcgaactgaccgccgctgaaggtcttgaacgttacctcggcgcaaaattccctggcgcaaaacgcttctcgctggaaggcggtgacgcgttaatcccgatgcttaaagagatgatccgccacgctggcaacagcggcacccgcgaagtggttctcgggatggcgcaccgtggtcgtctgaacgtgctggtgaacgtgctgggtaaaaaaccgcaagacttgttcgacgagttcgccggtaaacataaagaacacctcggcacgggtgacgtgaaataccacatgggcttctcgtctgacttccagaccgatggcggcctggtgcacctggcgctggcgtttaacccgtctcaccttgagattgtaagcccggtagttatcggttctgttcgtgcccgtctggacagacttgatgagccgagcagcaacaaagtgctgccaatcaccatccacggtgacgccgcagtgaccgggcagggcgtggttcaggaaaccctgaacatgtcgaaagcgcgtggttatgaagttggcggtacggtacgtatcgttatcaacaaccaggttggtttcaccacctctaatccgctggatgcccgttctacgccgtactgtactgatatcggtaagatggttcaggccccgattttccacgttaacgcggacgatccggaagccgttgcctttgtgacccgtctggcgctcgatttccgtaacacctttaaacgtgatgtcttcatcgacctggtgtgctaccgccgtcacggccacaacgaagccgacgagccgagcgcaacccagccgctgatgtatcagaaaatcaaaaaacatccgacaccgcgcaaaatctacgctgacaagctggagcaggaaaaagtggcgacgctggaagatgccaccgagatggttaacctgtaccgcgatgcgctggatgctggcgattgcgtagtggcagagtggcgtccgatgaacatgcactctttcacctggtcgccgtacctcaaccacgaatgggacgaagagtacccgaacaaagttgagatgaagcgcctgcaggagctggcgaaacgcatcagcacggtgccggaagcagttgaaatgcagtctcgcgttgccaagatttatggcgatcgccaggcgatggctgccggtgagaaactgttcgactggggcggtgcggaaaacctcgcttacgccacgctggttgatgaaggcattccggttcgcctgtcgggtgaagactccggtcgcggtaccttcttccaccgccacgcggtgatccacaaccagtctaacggttccacttacacgccgctgcaacatatccataacgggcagggcgcgttccgtgtctgggactccgtactgtctgaagaagcagtgctggcgtttgaatatggttatgccaccgcagaaccacgcactctgaccatctgggaagcgcagttcggtgacttcgccaacggtgcgcaggtggttatcgaccagttcatctcctctggcgaacagaaatggggccggatgtgtggtctggtgatgttgctgccgcacggttacgaagggcaggggccggagcactcctccgcgcgtctggaacgttatctgcaactttgtgctgagcaaaacatgcaggtttgcgtaccgtctaccccggcacaggtttaccacatgctgcgtcgtcaggcgctgcgcgggatgcgtcgtccgctggtcgtgatgtcgccgaaatccctgctgcgtcatccgctggcggtttccagcctcgaagaactggcgaacggcaccttcctgccagccatcggtgaaatcgacgagcttgatccgaagggcgtgaagcgcgtagtgatgtgttctggtaaggtttattacgacctgctggaacagcgtcgtaagaacaatcaacacgatgtcgccattgtgcgtatcgagcaactctacccgttcccgcataaagcgatgcaggaagtgttgcagcagtttgctcacgtcaaggattttgtctggtgccaggaagagccgctcaaccagggcgcatggtactgcagccagcatcatttccgtgaagtgattccgtttggggcttctctgcgttatgcaggccgcccggcctccgcctctccggcggtagggtatatgtccgttcaccagaaacagcaacaagatctggttaatgacgcgctgaacgtcgaataaataaaggatacacaatgagtagcgtagatattctggtccctgacctgcctgaatccgtagccgatgccaccgtcgcaacctggcataaaaaacccggcgacgcagtcgtacgtgatgaagtgctggtagaaatcgaaactgacaaagtggtactggaagtaccggcatcagcagacggcattctggatgcggttctggaagatgaaggtacaacggtaacgtctcgtcagatccttggtcgcctgcgtgaaggcaacagcgccggtaaagaaaccagcgccaaatctgaagagaaagcgtccactccggcgcaacgccagcaggcgtctctggaagagcaaaacaacgatgcgttaagcccggcgatccgtcgcctgctggctgaacacaatctcgacgccagcgccattaaaggcaccggtgtgggtggtcgtctgactcgtgaagatgtggaaaaacatctggcgaaagccccggcgaaagagtctgctccggcagcggctgctccggcggcgcaaccggctctggctgcacgtagtgaaaaacgtgtcccgatgactcgcctgcgtaagcgtgtggcagagcgtctgctggaagcgaaaaactccaccgccatgctgaccacgttcaacgaagtcaacatgaagccgattatggatctgcgtaagcagtacggtgaagcgtttgaaaaacgccacggcatccgtctgggctttatgtccttctacgtgaaagcggtggttgaagccctgaaacgttacccggaagtgaacgcttctatcgacggcgatgacgtggtttaccacaactatttcgacgtcagcatggcggtttctacgccgcgcggcctggtgacgccggttctgcgtgatgtcgataccctcggcatggcagacatcgagaagaaaatcaaagagctggcagtcaaaggccgtgacggcaagctgaccgttgaagatctgaccggtggtaacttcaccatcaccaacggtggtgtgttcggttccctgatgtctacgccgatcatcaacccgccgcagagcgcaattctgggtatgcacgctatcaaagatcgtccgatggcggtgaatggtcaggttgagatcctgccgatgatgtacctggcgctgtcctacgatcaccgtctgatcgatggtcgcgaatccgtgggcttcctggtaacgatcaaagagttgctggaagatccgacgcgtctgctgctggacgtgtagtagtttaagtttcacctgcactgtagaccggataaggcattatcgccttctccggcaattgaagcctgatgcgacgctgacgcgtcttatcaggcctacgggaccaccaatgtaggtcggataaggcgcaagcgccgcatccgacaagcgatgcctgatgtgacgtttaacgtgtcttatcaggcctacgggtgaccgacaatgcccggaagcgatacgaaatattcggtctacggtttaaaagataacgattactgaaggatggacagaacacatgaacttacatgaatatcaggcaaaacaactttttgcccgctatggcttaccagcaccggtgggttatgcctgtactactccgcgcgaagcagaagaagccgcttcaaaaatcggtgccggtccgtgggtagtgaaatgtcaggttcacgctggtggccgcggtaaagcgggcggtgtgaaagttgtaaacagcaaagaagacatccgtgcttttgcagaaaactggctgggcaagcgtctggtaacgtatcaaacagatgccaatggccaaccggttaaccagattctggttgaagcagcgaccgatatcgctaaagagctgtatctcggtgccgttgttgaccgtagttcccgtcgtgtggtctttatggcctccaccgaaggcggcgtggaaatcgaaaaagtggcggaagaaactccgcacctgatccataaagttgcgcttgatccgctgactggcccgatgccgtatcagggacgcgagctggcgttcaaactgggtctggaaggtaaactggttcagcagttcaccaaaatcttcatgggcctggcgaccattttcctggagcgcgacctggcgttgatcgaaatcaacccgctggtcatcaccaaacagggcgatctgatttgcctcgacggcaaactgggcgctgacggcaacgcactgttccgccagcctgatctgcgcgaaatgcgtgaccagtcgcaggaagatccgcgtgaagcacaggctgcacagtgggaactgaactacgttgcgctggacggtaacatcggttgtatggttaacggcgcaggtctggcgatgggtacgatggacatcgttaaactgcacggcggcgaaccggctaacttccttgacgttggcggcggcgcaaccaaagaacgtgtaaccgaagcgttcaaaatcatcctctctgacgacaaagtgaaagccgttctggttaacatcttcggcggtatcgttcgttgcgacctgatcgctgacggtatcatcggcgcggtagcagaagtgggtgttaacgtaccggtcgtggtacgtctggaaggtaacaacgccgaactcggcgcgaagaaactggctgacagcggcctgaatattattgcagcaaaaggtctgacggatgcagctcagcaggttgttgccgcagtggaggggaaataatgtccattttaatcgataaaaacaccaaggttatctgccagggctttaccggtagccaggggactttccactcagaacaggccattgcatacggcactaaaatggttggcggcgtaaccccaggtaaaggcggcaccacccacctcggcctgccggtgttcaacaccgtgcgtgaagccgttgctgccactggcgctaccgcttctgttatctacgtaccagcaccgttctgcaaagactccattctggaagccatcgacgcaggcatcaaactgattatcaccatcactgaaggcatcccgacgctggatatgctgaccgtgaaagtgaagctggatgaagcaggcgttcgtatgatcggcccgaactgcccaggcgttatcactccgggtgaatgcaaaatcggtatccagcctggtcacattcacaaaccgggtaaagtgggtatcgtttcccgttccggtacactgacctatgaagcggttaaacagaccacggattacggtttcggtcagtcgacctgtgtcggtatcggcggtgacccgatcccgggctctaactttatcgacattctcgaaatgttcgaaaaagatccgcagaccgaagcgatcgtgatgatcggtgagatcggcggtagcgctgaagaagaagcagctgcgtacatcaaagagcacgttaccaagccagttgtgggttacatcgctggtgtgactgcgccgaaaggcaaacgtatgggccacgcgggtgccatcattgccggtgggaaagggactgcggatgagaaattcgctgctctggaagccgcaggcgtgaaaaccgttcgcagcctggcggatatcggtgaagcactgaaaactgttctgaaataaatatctgtaataagaaatagccctcgccgcttccctctacaggaatggcgaagggctgtcggtttcgacatggttggccatcgtatgatggccttttttgtgcttatcgcgatgattttcgctgcgctatcagggtaaatttatagtcatcggtattaaaagcgttgcggctatattcaaacacccgaccatcaactaaatatccacgcgatactttttcaagaatcggctttgtctggctgatattaagcagacggctcatctcttcggttggcatcagaggaatgatttcctgttcgctacgatcgataaccattttcttcacttcttcgataaagtgatatttcgaattttccatgacctgccaggtgagatccgggaacaacgcaagcggcatccaggtttcttccagcgccattggcttttgcttgcgatagcgcacgcgcttcacatgccacacacgatcctgcggggtgatttgtagctgttgctgaagaaaatcgtcagccggaatcacttcgaatatcagaacttcactgtgtgtatcgacgtgacggtccgacagtttttcatcaaaactggttaactgaaaaatatcgtaattgacccgctcttctttgacgtaagtcccgctgccctgaatgctttcgaggatctgctgctcgactagctggcgcaaagcctgacgcaccgtaacccggctgacgccaaactctgtttgtagcgctgattcagtgggtaacgcatcgccaggtttaagctcgccacgcgcaatttgttcacgaatgcgatcggcaatctgccggtataagggcttgtgtcccatttttagtatctcattaatacgaatttaaccattatgcccgataaattcatcctgtaaataatacaaatacaatacaaataatttcaatcaagtgaaattgatcacataatggtattgttttatcgggcacactggcgcgactataaaaacgatcaagtgaggatcatgatgaatctgacgactctgacccaccgcgatgcgttgtgtctgaatgcgcgctttaccagccgtgaagaggccatccacgcgttgactcaacgtcttgctgctctggggaaaatttccagtactgagcaatttctggaagaagtgtatcgccgtgaaagccttggcccgaccgccttaggtgaagggttggctgtgccgcatggcaaaactgctgcggtaaaagaagcggcgtttgcggtcgccacactcagcgagccgcttcagtgggaaggcgttgatggcccggaagcagttgatttagtggtgctgctggcgattccccccaatgaagcgggtactacgcatatgcaactgctgacagcgctgaccacgcgccttgcggatgatgagattcgggcgcgtatacagtcggcgacgacgcctgatgagttgctctcggcgctggatgacaagggaggcacgcaaccttctgcctctttttccaacgcgccaactatcgtctgcgtaacggcctgtccggcgggtattgctcacacctatatggctgcggaatatctggaaaaagccggacgcaaactcggcgtaaatgtttacgttgaaaaacaaggcgctaacggcattgaagggcgtttaacggcggatcaactcaatagtgcaaccgcctgtatttttgcggctgaagtcgccatcaaggagagtgagcgttttaatggcattcccgcgctttcagtgcctgttgccgagccgattcgccatgcagaagcgttgatccaacaagcgcttaccctcaagcgtagcgatgagacgcgtaccgtacagcaagatacgcaaccggtgaaaagtgtcaaaacggagctgaaacaggcactgttgagcggaatctcttttgccgtaccgttgattgtcgcggggggcacggtgctggcggtcgcggtattactgtcgcaaatcttcgggctacaagatctgtttaatgaagaaaactcctggctgtggatgtaccgcaagctgggcggcgggctgctcggaattttgatggtaccggtgctcgcggcctataccgcctattctctggcagataaaccggcgttagcgccaggctttgcggctggacttgccgccaacatgatcggctccgggtttctcggcgcggtcgttggcggattgatagccggttacttgatgcgctgggtgaaaaatcacttgcgtcttagcagtaaattcaatggattcctgactttttatctctacccggtgctcggtacgttgggagcgggcagtctgatgctgtttgtggtgggggaacctgtcgcctggatcaataactcgcttaccgcctggctgaacggtctgtcaggaagtaacgcgctgttgctgggtgccattctcggttttatgtgttcctttgaccttggagggccagtgaataaagccgcttatgcattctgcctgggcgcaatggcgaacggcgtttacggcccgtatgccattttcgcctccgtcaaaatggtttcggcatttaccgtaaccgcttccacgatgctcgcaccgcgcctgtttaaagagtttgaaattgagaccgggaaatccacctggctgttagggctggcaggtattaccgaaggggcgatcccgatggcgattgaagatccgctgcgggttattggttcgtttgtgctgggctctatggtaacgggcgctattgtcggtgcgatgaatatcggcctttcgacacccggtgccggcattttctcgctctttttacttcatgataatggcgcgggcggtgttatggcggcaattggctggtttggcgcggcattggtgggggctgcaatctcgactgcaattctcctgatgtggcggcgtcacgcggttaagcatggcaactatctgactgatggcgtaatgccataaacaaaaaggaaacgacgatgaaagcagtatctcgcgttcacatcaccccgcatatgcactgggatcgagagtggtatttcaccaccgaagagtcacgtattctgctggtcaataatatggaagagatcctgtgccgactggaacaggacaacgaatacaaatattacgtactcgacgggcaaacggcgatcctcgaagattatttcgcggtgaaaccggaaaacaaagaccgtgtgaagaaacaggtagaagccggcaagttgattatcggcccctggtatacccagaccgataccacgattgtttctgcggaatccatcgtccgtaatctgatgtacggaatgcgtgactgcctcgcgtttggcgagccgatgaaaataggttatttaccagattcctttggcatgtccgggcaactgccgcatatctacaatggatttggcattacccgcaccatgttctggcgcggatgttcggagcgccacggtactgataaaaccgagtttttgtggcaaagcagtgacggtagcgaagtgacggcgcaggtgctgccgctgggctacgccatcggtaagtacttacctgccgacgaaaacggattacgtaaacgcctcgacagttattttgacgtgctggaaaaagcgtctgtaaccaaagagattttgctgccgaatgggcatgaccagatgccattgcagcaaaatatcttcgaagtgatggataagctacgtgagatctaccctcaacgtaagtttgtgatgagccgctttgaagaggtatttgagaagatcgaagcgcagcgagataatctggcaaccctgaaaggggaatttattgatggcaaatatatgcgcgtgcatcgcaccatcggttctacgcgtatggatatcaaaattgcccacgcgcgtattgaaaataagattgttaatctgctggaaccgctggcaacactggcctggacgttgggttttgaataccaccacggcttgctggagaaaatgtggaaagagatcttaaaaaatcatgcccacgacagtatcggctgctgctgtagtgacaaagttcatcgcgaaatcgtcgcccgcttcgaactggctgaagacatggcggataatctgattcgtttctacatgcgcaaaattgccgacaacatgccgcagagcgacgccgacaaactcgtcctgtttaacctgatgccctggccgcgtgaagaagttatcaacaccactgtgcggctgcgcgccagccagtttaatttgcgggacgatcgcggtcagcctgtaccgtattttattcgccatgcccgtgagatcgatccaggcctaatcgatcggcaaatagttcattacggtaattacgatccctttatggagtttgatatacagatcaaccagattgtcccttctatgggctatcgcacgctttatatcgaagcgaatcagcctggcaacgtaattgcggcaaaaagtgacgctgaagggatactggaaaatgctttctggcaaattgcgctcaatgaggatggttctctgcaactggtagataaagacagcggtgtgcgctatgaccgggtattgcaaattgaagaaagctctgatgatggtgatgaatatgactattcacccgcaaaagaagagtgggtaattaccgcagcgaacgcgaaaccgcaatgcgatattattcatgaagcctggcagagcagggctgttatccgctatgacatggcagtgccgctcaatttgtcagaacgcagcgcccggcaatccactggcagagtaggggtggtgttggttgtcactcttagtcataacagcaggcgtattgatgtggatatcaatcttgataaccaggctgacgatcatcgccttcgtgtcctggtccctacaccttttaacaccgacagtgttctggcagatacgcagtttggttcgctaacgcgccccgtgaacgacagtgcaatgaacaactggcagcaagaaggctggaaagaagcgccggttccggtatggaatatgctcaactatgttgccttacaggaagggcgtaacggcatggctgtctttagcgaagggttacgtgaatttgaagtcatcggtgaagagaagaaaacctttgccattacgttgctgcgtggcgtgggcttactgggcaaagaagatctgcttttaaggcctgggcggccttcgggaattaaaatgccagtcccggactcacaactacgtggtctgctttcttgtcgcctaagtttattgagttataccggtacgccaaccgccgctggtgtagctcagcaggcgcgagcatggctgactccagtacagtgttacaacaaaatcccatgggatgtgatgaagctcaacaaagccggattcaacgtgccggaaagttatagtttgttgaaaatgcccccagtgggatgcctgataagcgcacttaagaaagctgaagaccgacaagaagtgattttacggctgtttaatccggctgaatcagcaacctgtgatgcgactgttgctttcagtcgcgaggtgatttcttgctcagaaacgatgatggatgaacacattaccaccgaggaaaatcaaggttcaaatctatcggggccttttttacccggccagtcacggacgttcagttaccggcttgcctgaatagcaatcaaaccgaagccacatatgcgcggccagattgttgacaaagggcgctttgttcatgccggatacggcatgaacgctttattcggtctacaaaagcaggcaaattcaatatattgcagagatgatgtagacactggcaagcgtagcgcatcaggtaattttgcgtttatcttcactctcaagccacgtatatgtggctttatttttaacaaaataataaccctgggtgagttaattataatataattataagttaactaaatgttaatattggcggggtggatttatgcctttattagtaatcctgaaactctgcgtcgtattagccagtgaccaaaaaaagaattaaggtcaaccgtgctgtttttgcttcgtctctttttatctttaattgccaaccgaaactaatttcagccttataactcacacattttaaacataaatgtcactaaagttaccttattgaaacatgattaacataatttgtaggaattgatatttatcaatgtataagtcttggaaatgggcatcaaaaagagataaattgttctcgatcaaattggctgaaaggcggtaatttagctataaattgatcaccgtcgaaaaatgcaaatttgcttcaacaaaaacctgtttattgtaaggattttgcggcgtaatatatacgtgggatcaatttgagtttttattaacatgtttgcaacctttctttacgccgtttttgtgtgcattcacatggtatgatgaaagtgttcaaacaaatttctattggggcatgcgtgtgaccctttctaacggggttcactctcggagtcttcatgcgatgagcaaggagtcatgatgttagatatagtcgaactgtcgcgcttacagtttgccttgaccgcgatgtaccacttcctttttgtgccactgacgctcggtatggcgttcctgctggccattatggaaacggtctacgtcctctccggcaaacagatttataaagatatgaccaagttctggggcaagttgtttggtatcaacttcgctctgggtgtggctaccggtctgaccatggagttccagttcgggactaactggtcttactattcccactatgtaggggatatcttcggtgcgccgctggcaatcgaaggtctgatggccttcttcctcgaatccacctttgtaggtctgttcttcttcggttgggatcgtctgggtaaagttcagcatatgtgtgtcacctggctggtggcgctcggttcaaacctgtccgcactgtggattctggttgcgaacggctggatgcaaaacccaatcgcgtccgatttcaactttgaaactatgcgtatggagatggtgagcttctccgagctggtgcttaacccggttgctcaggtgaaattcgttcacactgtagcgtctggttatgtgactggcgcgatgttcatcctcggtatcagcgcatggtatatgctgaaaggtcgtgacttcgccttcgctaaacgctcctttgctatcgctgccagcttcggtatggctgctgttctgtctgttattgttctgggtgatgaatccggctacgaaatgggcgacgtgcagaaaaccaaactggctgctattgaagccgagtgggaaacgcaacctgcgcctgctgcctttactctgttcggcattcctgatcaggaagaggagacgaacaaatttgcgattcagatcccttacgcactgggcatcattgcaacgcgttccgtggataccccggttatcggcctgaaagagctgatggtgcagcatgaagaacgcattcgtaacgggatgaaggcgtactctctgctcgaacaactgcgttctggttctaccgaccaggcggttcgtgaccagttcaatagcatgaagaaagacctcggttacggtctgctgctgaaacgctatacgccaaacgtggctgatgcgactgaagcgcagattcaacaggcaaccaaagactccatcccgcgtgtagcgccgctgtactttgcgttccgtatcatggtggcgtgtggcttcctgcttctggcaatcatcgcgctctctttctggagtgtcatccgcaaccgcattggcgagaaaaaatggcttctgcgcgccgcgctgtacggtattccgctgccgtggattgctgtagaagcgggctggttcgtggctgaatatggccgccaaccgtgggctatcggtgaagtgctgccgacagctgtggcgaactcgtcactgaccgcaggcgatctcatcttctcaatggtgctgatttgcggcctgtataccctgttcctggtggcagaattgttcttaatgttcaagtttgcacgcctcggcccaagcagcctgaaaaccggtcgctatcactttgagcagtcttccacgactactcagccggcacgctaagacaggagtcgtcaaatgatcgattatgaagtattgcgttttatctggtggctgctggttggcgttctgctgattggttttgcagtcactgacggtttcgacatgggggtgggcatgctcacccgtttcctcggtcgtaacgacaccgagcgtcgaattatgattaactccattgcaccacactgggacggtaaccaggtttggctgatcaccgcgggcggcgcactctttgctgcctggccgatggtctatgccgctgcgttctccggcttctatgtggcgatgatcctcgtgctggcgtctttgttcttccgtccggtcggttttgactaccgctccaagattgaagaaacccgctggcgtaacatgtgggactggggcatcttcattggtagcttcgttccgccgctggtaattggtgtagcgttcggtaacctgttgcagggcgtaccgttcaacgttgatgaatatctgcgtctgtactacaccggtaacttcttccagttgcttaacccgttcggcctgctggcaggcgtggtgagcgtagggatgatcattactcagggcgcaacctatctgcaaatgcgtaccgtgggcgaactgcacctgcgtacccgtgcaacggctcaggtggctgcgctggtgacactggtctgtttcgcactggctggcgtatgggtgatgtacggtatcgatggttatgtcgtgaaatcgacaatggaccattacgcagcctctaacccactgaataaagaagtggttcgtgaagctggcgcatggctggttaacttcaacaacacgccaattctgtgggctattccggcactgggtgtggttctgccgctgctgaccatcctgactgcacgtatggataaagccgcgtgggcgtttgtgttctcctccctgacgctggcctgcatcatcctgacagccggtatcgcaatgttcccgtttgtgatgccgtccagcaccatgatgaacgcaagtctgacaatgtgggatgcaacttccagccagctgacgcttaacgtcatgacctgggttgcggtggttctggtaccgatcattctgctctacaccgcctggtgttactggaaaatgttcggtcgtatcaccaaagaagatattgaacgtaacacccactctctgtactaagtaaggagctaaaaatgtggtatttcgcatggattctgggaacgcttcttgcctgttcgtttggggtaatcaccgcgctggcgcttgaacacgtcgaatcaggcaaagccggtcaagaagacatctgatgagtaagattatcgcgactttgtatgcggtaatggacaagcgccccctgcgggcgctttccttcgtgatggcgcttctgttagcaggatgtatgttttgggacccatctcgttttgccgcgaagaccagtgaactggaaatctggcatggtttattgctgatgtgggccgtctgtgctggtgtgattcacggcgtgggctttcgtccgcagaaggttctttggcaagggattttttgcccattgcttgccgatattgttctcattgtcgggctgattttcttcttcttttaaatcagaattctctttaaaaaattatgggccgctccaggcccataaatttttacgctcccttaacttgccctcattcccaaacctcaatcgcgcgcgtatagtagcagcgtttaaaagctctaacttttgttgcattaccgggatgtaaagtgaatacaacgctgtttcgatggccggttcgcgtctactatgaagataccgatgccggtggtgtggtgtaccacgccagttacgtcgctttttatgaaagagcacgcacagagatgctgcgtcatcatcacttcagtcagcaggcgctgatggctgaacgcgttgcctttgtggtacgtaaaatgacggtggaatattacgcacctgcgcggctcgacgatatgctcgaaatacagactgaaataacatcaatgcgtggcacctctttggttttcacgcaacgtattgtcaacgccgagaatactttgctgaatgaagcagaggttctggttgtttgcgttgacccactcaaaatgaagcctcgtgcgcttcccaagtctattgtcgcggagtttaagcagtgactgacatgaatatccttgatttgttcctgaaggctagccttctggttaaacttatcatgttgattttgattggtttttcaatcgcatcttgggccattattatccagcggacccgtattcttaacgcagcggcgcgcgaagccgaagcgtttgaagataaattctggtctggaatcgaactctctcgcctctatcaagagagccaggggaaacgggataatctgactggttcggaacaaatcttttacagcgggttcaaagagtttgtgcgcctgcatcgtgccaatagccatgcgccggaagccgtagtggaaggggcgtcgcgtgctatgcgtatctccatgaaccgtgaacttgaaaatctggaaacgcacattccgttcctcggtacggttggctccatcagcccgtatattggtctgtttggtacggtctgggggatcatgcacgcctttatcgccctcggggcggtaaaacaagcaacactgcaaatggttgcgcccggtatcgcagaagcgttgattgcgactgcaattggtctgtttgccgctatcccggcagttatggcctacaaccgcctcaaccagcgcgtaaacaaactggaactgaattacgacaactttatggaagagtttaccgcgattctgcaccgccaggcgtttaccgttagcgagagcaacaaggggtaagccatggccagagcgcgtggacgaggtcgtcgcgatctcaagtccgaaatcaacattgtaccgttgctggacgtactgctggtgctgttgctgatctttatggcgacagcgcccatcatcacccagagcgtggaggtcgatctgccagacgctactgaatcacaggcggtgagcagtaacgataatccgccagtgattgttgaagtgtctggtattggtcagtacaccgtggtggttgagaaagatcgcctggagcgtttaccaccagagcaggtggtggcggaagtgtccagccgtttcaaggccaacccgaaaacggtctttctgatcggtggcgcaaaagatgtgccttacgatgaaataattaaagcactgaacttgttacatagtgcgggtgtgaaatcggttggtttaatgacgcagcctatctaaacatctgcgtttcccttgcttgaaagagagcgggtaacaggcgaacagtttttggaaaccgagagtgtcaaaggcaaccgaacaaaacgacaagctcaagcgggcgataattatttcagcagtgctgcatgtcatcttatttgcggcgctgatctggagttcgttcgatgagaatatagaagcttcagccggaggcggcggtggttcgtccatcgacgctgtcatggttgattcaggtgcggtagttgagcagtacaaacgcatgcaaagccaggaatcaagcgcgaagcgttctgatgaacagcgcaagatgaaggaacagcaggctgctgaagaactgcgtgagaaacaagcggctgaacaggaacgcctgaagcaacttgagaaagagcggttagcggctcaggagcagaaaaagcaggctgaagaagccgcaaaacaggccgagttaaagcagaagcaagctgaagaggcggcagcgaaagcggcggcagatgctaaagcgaaggccgaagcagatgctaaagctgcggaagaagcagcgaagaaagcggctgcagacgcaaagaaaaaagcagaagcagaagccgccaaagccgcagccgaagcgcagaaaaaagccgaggcagccgctgcggcactgaagaagaaagcggaagcggcagaagcagctgcagctgaagcaagaaagaaagcggcaactgaagctgctgaaaaagccaaagcagaagctgagaagaaagcggctgctgaaaaggctgcagctgataagaaagcggcagcagagaaagctgcagccgacaaaaaagcagcagaaaaagcggctgctgaaaaggcagcagctgataagaaagcagcggcagaaaaagccgccgcagacaaaaaagcggcagcggcaaaagctgcagctgaaaaagccgctgcagcaaaagcggccgcagaggcagatgatattttcggtgagctaagctctggtaagaatgcaccgaaaacggggggaggggcgaaagggaacaatgcttcgcctgccgggagtggtaatactaaaaacaatggcgcatcaggggccgatatcaataactatgccgggcagattaaatctgctatcgaaagtaagttctatgacgcatcgtcctatgcaggcaaaacctgtacgctgcgcataaaactggcacccgatggtatgttactggatatcaaacctgaaggtggcgatcccgcactttgtcaggctgcgttggcagcagctaaacttgcgaagatcccgaaaccaccaagccaggcagtatatgaagtgttcaaaaacgcgccattggacttcaaaccgtaatcgcgatgttgactgttcggacggtcaacatcaggcaccggttgccacggggttctggtagttttgtgtattttagtttgttaacattctgctaaattatcgtgggccatcggtccagataagggagatatgatgaagcaggcattacgagtagcatttggttttctcatactgtgggcatcagttctgcatgctgaagtccgcattgtgatcgacagcggtgtagattccggtcgtcctattggtgttgttcctttccagtgggcggggcctggtgcggcacctgaagatattggcggcatcgttgctgctgacttgcgtaacagcggtaaatttaatccgttagatcgcgctcgtctgccacagcagccgggtagtgcgcaggaagtacaaccagctgcatggtccgcactgggcattgacgctgtagttgtcggtcaggtcactccgaatccggatggttcttacaatgttgcttatcaacttgttgacactggcggcgcaccgggtactgtacttgctcagaactcgtacaaagtgaacaagcagtggctgcgttatgctggtcataccgccagtgatgaagtgtttgaaaaactgaccggcattaaaggtgcgttccgtactcgtattgcctacgttgttcagaccaacggcggtcagttcccgtatgaactgcgcgtatctgactatgacggttacaaccagtttgtcgttcaccgttcaccgcagccgctgatgtctccggcgtggtcaccagacggttctaaactggcttatgtgaccttcgaaagcggtcgttccgcgctggttattcagacgctggcaaatggcgctgtacgtcaggtggcttcattcccgcgtcacaacggtgcacctgcattctcgccagacggcagcaaactggcattcgccttgtcgaaaaccggtagtctgaacctgtacgtaatggatttggcttctggtcagatccgccaggtgactgatggtcgcagtaacaataccgaaccgacctggttcccggatagccagaacctggcatttacttctgaccaggccggtcgtccgcaggtttataaagtgaatatcaacggcggtgcgccacaacgtattacctgggaaggttcgcagaaccaggatgcggatgtcagcagcgacggtaaatttatggtaatggtcagctccaatggtgggcagcagcacattgccaaacaagatctggcaacgggaggcgtacaagttctgtcgtccacgttcctggatgaaacgccaagtctggcacctaacggcactatggtaatctacagctcttctcaggggatgggatccgtgctgaatttggtttctacagatgggcgtttcaaagcgcgtcttccggcaactgatggacaggtcaaattccctgcctggtcgccgtatctgtgataataattaattgaatagtaaaggaatcattgaaatgcaactgaacaaagtgctgaaagggctgatgattgctctgcctgttatggcaattgcggcatgttcttccaacaagaacgccagcaatgacggcagcgaaggcatgctgggtgccggcactggtatggatgcgaacggcggcaacggcaacatgtcttccgaagagcaggctcgtctgcaaatgcaacagctgcagcagaacaacatcgtttacttcgatctggacaagtacgatatccgttctgacttcgctcaaatgctggatgcacatgcaaacttcctgcgtagcaacccgtcttacaaagtcaccgtagaaggtcacgcggacgaacgtggtactccggaatacaacatctccctgggtgaacgtcgtgcgaacgccgttaagatgtacctgcagggtaaaggcgtttctgcagaccagatctccatcgtttcttacggtaaagaaaaacctgcagtactgggtcatgacgaagcggcatactccaaaaaccgtcgtgcggtactggtttactaagagaattgcatgagcagtaacttcagacatcaactattgagtctgtcgttactggttggtatagcggccccctgggccgcttttgctcaggcaccaatcagtagtgtcggctcaggctcggtcgaagaccgcgtcactcaacttgagcgtatttctaatgctcacagccagcttttaacccaactccagcaacaactttctgataatcaatccgatattgattccctgcgtggtcagattcaggaaaatcagtatcaactgaatcaggtcgtggagcggcaaaagcagatcctgttgcagatcgacagcctcagcagcggtggtgcagcggcgcaatcaaccagcggcgatcaaagcggtgcggcggcatcaacgacgccgacagctgatgctggtactgcgaatgctggcgcgccggtgaaaagcggtaatgcaaacacggattacaatgcagctattgcgctggtgcaggataaatcccgccaggatgacgcaatggtggcatttcagaatttcatcaaaaattaccctgattcaacttacctgccaaacgccaattattggctgggtcagttaaactacaacaagggtaaaaaagatgatgcggcgtactattttgcttcggtagtgaaaaactatccgaagtcaccaaaggctgcagatgcgatgtttaaagtcggcgtcatcatgcaggacaaaggtgacaccgcaaaagcgaaagccgtataccagcaggttatcagtaaataccctggtactgatggcgctaaacaggcacaaaaacgtctgaacgcgatgtaatgcataacacacgaccagaagtcgcattatttctggtcgtgtcgtgcgaatcataagcagttgagtgatctacatcgaaatttttgttgcgctcaagtctgaaatcagtaatatatgccgccgttgccacgggatatcaaacaaaccgaaagcaacgaaaaagtgggtcgttagctcagttggtagagcagttgacttttaatcaattggtcgcaggttcgaatcctgcacgacccaccaatcgctaaggtggaagcggtagtaaaacgtgaaggataacgttgcatgagcaacggcccgaagggcgagacgaagtcgagtcatcctgcacgacccaccactaacatagttagttgtagtatccagcgtagtatcgggtgattagctcagctgggagagcacctcccttacaaggagggggtcggcggttcgatcccgtcatcacccaccaccgggtcgttagctcagttggtagagcagttgacttttaatcaattggtcgcaggttcgaatcctgcacgacccaccagttttaacatcgaagacagatgttaagcgtgtaggataacgttgcgtcagcaacggcccgtagggcgagcgaagcgagtcatcctgcacgacccaccactaatgacggtgggttcggtggaagtagtttgtagtatccagcgcagtatcgggtgattagctcagctgggagagcacctcccttacaaggagggggtcggcggttcgatcccgtcatcacccaccactcgggtcgttagctcagttggtagagcagttgacttttaatcaattggtcgcaggttcgaatcctgcacgacccaccagttttaacatcaaactcagatgttaagcgtgaaggataacgttgcgccagcaacggcccgtagggcgagcgaagcgagtcatcctgcacgacccaccaatcttaaagattggccccgagtaaaaatctttcaggtaacacccgtatgggtcgttagctcagttggtagagcagttgacttttaatcaattggtcgcaggttcgaatcctgcacgacccaccaatttaaaggtggttactggtagagaacgtgaaggataacgttgcgttagcaacggcccgaagggcgagacgaagtcgagtcatcctgcacgacccaccatcctgaatgattaaggcagcataatcccgcaaggggtcgttagctcagttggtagagcagttgacttttaatcaattggtcgcaggttcgaatcctgcacgacccaccaatgtaaaaaagcgccctaaaggcgcttttttgctatctgcgatactcaaagattcgaacctgcagcaggtttgagttgagcgcagcgaaacaacggagccgctcgcggcgacggcccgaagggcgagcgaagcgagtcatcctgcacgacccaccaatgtaaaaaagcgccctaaaggcgcttttttgctattcaggcatcctcaatttcactttgtaaacctgatgacatcgtcagagcttactgtgcaagcaactctatgtcggtggaattaggcgtaaaatgacgcatcctgcacattaggcgtaattcgagtgacttttccccaccattcgactatcttgtttagcatataaaacaaattacaccgataacagcgaatattacgctaatgtcggttttaacgttaagcctgtaaaacgagatggtaagatgagcgtaatgtttgatccagacacggcgatttatcctttccccccgaagccgacgccgttaagcattgatgaaaaagcgtattaccgcgagaagataaaacgtctgctaaaagaacgtaatgcggtgatggttgcccactactataccgatcccgaaattcaacaactggcagaagaaaccggtggctgtatttctgattctctggaaatggcgcgcttcggtgcaaagcatcccgcttctactttgttagtcgctggggtgagatttatgggagaaaccgccaaaattctcagtccggaaaaaacaattctgatgccgacacttcaggctgaatgttcactggatctcggctgccctgttgaagaatttaacgcattttgcgatgcccatcccgatcgtactgtcgtcgtctacgccaacacttctgctgcggtaaaagcgcgcgcagattgggtggtaacttcaagcattgccgtcgaacttattgatcatcttgatagtttgggtgaaaaaatcatctgggcacccgacaaacatctggggcgttacgtgcaaaaacagacgggtggagacattctatgctggcagggtgcctgtattgtgcatgatgaatttaagactcaggcgttaacccgcttgcaagaagaatacccggatgctgccatactggtgcatccagaatcaccacaagctattgtcgatatggcggatgcggtcggttccaccagtcaactgatcgctgctgcgaaaacattgccacatcagaggcttattgtggcaaccgatcggggtattttctacaaaatgcagcaggcggtgccagataaagagttactggaagcaccaaccgcaggtgagggtgcaacctgccgcagctgcgcgcattgtccgtggatggccatgaatggccttcaggccatcgcagaggcattagaacaggaaggaagcaatcacgaggttcatgttgatgaaaggctgcgagagagggcgctggtgccgctcaatcgtatgctggattttgcggctacactacgtggataacgaataataaggcgtaacgttacgctttgggggaaagatggatttttttagtgtgcagaatatcctggtacatataccaataggggcaggcggttatgatctctcatggatcgaagcggtaggcacgatcgccgggttgctgtgtattggccttgccagtctggagaagatcagcaactacttctttggcctgatcaacgtcaccttgtttggcattattttctttcagattcagctgtatgccagcctgctattacaggtgtttttctttgccgcgaatatttacggttggtatgcgtggtcgcgacaaaccagtcagaacgaggcggagttgaaaattcgctggttgccattgccgaaggcactcagctggttggcggtttgcgttgtttcgattggtctgatgacggtatttatcaatccggtgtttgcatttttgacccgcgtggcagtcatgatcatgcaagcattaggattacaggttgtgatgcctgaactgcaaccggacgctttcccgttctgggattcatgcatgatggtgttatctatcgtggcaatgattctgatgacgcgtaagtatgtggaaaactggctgttgtgggtgattattaacgtgattagcgtcgttatttttgcacttcagggcgtttacgccatgtctctggagtacatcatcctgacctttattgcgctcaacggcagccggatgtggatcaacagcgcacgtgaaagaggctcacgcgcgctgtcccattaatggtgatgatgtgaatggccagacaccccttcattcaggtggcagtctggcccatgacaaggttgatattccatctgaatggtggcgtgctcaatctgatagtgatccatcaggtagtgttggatctgatccaacaaggcatcgtgatcgtgtggcgggatcacctgcacatgcaacgtcatcaccggcttctcgcctaccatccatacatgtacatggtgcacattgcggacttccgggatttcccggcacatacgacgcttcagttcagcgatatccagcgataccggtgcaccttcaagtaattcattcacgctatctttcaacagtcgccacgcgctacgcagaaccagaagcgacaccagtatcgagagaatggggtcagcaggtgtccagccagtccagataataatcaacgcggcaataatagccccaaccgaacccagcaggtccccgagcacatgcagtgccgctgctcgtacgttgaggtttttctcttcgctgccgtgatgaagtaaccagaaagaaagtatatttgccagcaacccagccacggcaattgccatcatcatgccgccctcgaccggacgcggcgtgcggaagcgttctatcgcctcccagacaatcaaaatggtaattaccacgagggctatggcattcacaaacgccgcgagcgtggtcagtcttagccaaccgaaagtgtggcgaatggtgggaggacgacgtgaaaattgcacggcgagtagggcgaaaagcagggcggcagtatcggtcaacatatgacccgcatcggccagcaatgccagagaaccagaaagaaaaccaccaacgacttctaccagcataaacccggcagtcacgccgaaagcatacaacaagcgacgagcattattatcttctggcaggtgtgaggacgtgtgtgagtgtgagtgcgccatgacgagtcatcccttaattattctcacttaactttatgacatcatactgcttttagaagtgaaaaattaaaagggagagactccgctctcccattattggctattttgcagggttactgcgtggtaccgtcggttttggtatcgacatcattattgatgccatcaccggtttgtacctttttattgatatccggacagcgaccatctttgcacatggtgttcttgtgctcttcatctttggtcattccgtcattgttcattgaagaaccatccgaatgcagcattgtgccgccagaaccggtatttaccccgttattgtcgacgttatttggcgcgacattttcacgggcgtcaggggctacctggcccgcatcagctgcggcgtttgcctggccgttattagtttgcgctccgctatcggcagccagtgcggcaccgctggcaaggcttagagtggcagtcagaaataatgtggccagttttgtcattttcataggatgctcctgttatggtcgttatgtcggataacctcttccaacagtgcatttgcaggtgaatataaggcattggtttaagatttcagccaggttatgaaacgcagcagagaatcttgaaataattaacaaacaaaggagttacagttagaaattgtaggagagatctcgtttttcgcgacaatctggcgtttttcttgctaattccaggattaatccgttcatagtgtaaaaccccgtttacacattctgacggaagatatagattggaagtattgcattcactaagataagtatggcaacactggaacagacatgaattatcagaacgacgatttacgcatcaaagaaatcaaagagttacttcctcctgtcgcattgctggaaaaattccccgctactgaaaatgccgcgaatacggttgcccatgcccgaaaagcgatccataagatcctgaaaggtaatgatgatcgcctgttggttgtgattggcccatgctcaattcatgatcctgtcgcggcaaaagagtatgccactcgcttgctggcgctgcgtgaagagctgaaagatgagctggaaatcgtaatgcgcgtctattttgaaaagccgcgtaccacggtgggctggaaagggctgattaacgatccgcatatggataatagcttccagatcaacgacggtctgcgtatagcccgtaaattgctgcttgatattaacgacagcggtctgccagcggcaggtgagtttctcgatatgatcaccccacaatatctcgctgacctgatgagctggggcgcaattggcgcacgtaccaccgaatcgcaggtgcaccgcgaactggcatcagggctttcttgtccggtcggcttcaaaaatggcaccgacggtacgattaaagtggctatcgatgccattaatgccgccggtgcgccgcactgcttcctgtccgtaacgaaatgggggcattcggcgattgtgaataccagcggtaacggcgattgccatatcattctgcgcggcggtaaagagcctaactacagcgcgaagcacgttgctgaagtgaaagaagggctgaacaaagcaggcctgccagcacaggtgatgatcgatttcagccatgctaactcgtccaaacaattcaaaaagcagatggatgtttgtgctgacgtttgccagcagattgccggtggcgaaaaggccattattggcgtgatggtggaaagccatctggtggaaggcaatcagagcctcgagagcggggagccgctggcctacggtaagagcatcaccgatgcctgcatcggctgggaagataccgatgctctgttacgtcaactggcgaatgcagtaaaagcgcgtcgcgggtaaggtttaattgtcggatgcgccgtcagagtggcgtatccgatgaatcaccacaggcctgataagtcgcgcagcgtcgcatcaggcaatgtgctccattgttagcaacaaaaaagccgactcacttgcagtcggctttctcattttaaacgaatgacgtttacttcgctttaccctggtttgcaaccgccgctgctttcgctgcgatctcgtcagcattacccagataatagcgtttcagcggtttgaaattctcgtcgaactcatacaccagcggcacgccagtcgggatattaagctcaagaatctcttcttcgctcatgttatcaagatatttcaccagcgcacgtaaagagttaccgtgtgcagcgatgatcacgcgctcaccgctcttcatacgcggcagaatagtttcattccagtaagggatcacgcggtcaatggtcagcgccaggctttccgtcagcggcagttctttctcgctcagtttcgcgtaacgcggatcgtgacccggataacgctcatcatctttagtcagttccggcggagtcactgcaaaaccacgacgccactgtttcacctgctcgtcgccatacttttcagcagtttccgctttgttcagaccctgcaacgcaccgtagtgacgttcgttcagtttccaggatttctcaacgggcagccatgcctgatccagttcgtccagcacattccacagggtatggatagcgcgtttcagcacagaagtgtaagcaaagtcaaagctgtaaccttcctctttcagcagcttacctgctgcttttgcttcgcttacgcctttctcagacagatccacgtcgtaccaaccggtgaaacggttttctttgttccactgactttcgccatgacgaaccagaaccagcttagttacagccatatacttactcctcaaatcatcttttaatgataataattctcattatattgccgcgacgaagcaacagcaatgcttacgcataaccatagcgaaaatagtggcgcagtgtaaggttgttgtgaatattgagttgcaaatatgtcggtgtttgctggtgatttgaacaatatgagataaagccctcatgacgagggcgtaacattactcagcaataaactgatattccgtcaggctggaatactcttcgccaggacgcaggaagcagtccggttgcggccattcagggtggttcgggctgtccggtagaaactcgctttccagagccagcccttgccagtcggcgtaaggttcggttccccgcgacggtgtgccgccgaggaagttgccggagtagaattgcagagccggagcggtggtgtagaccttcagctgcaatttttcatctgctgaccagacatgcgccgccactttcttgccatcgcctttggcctgtaacaagaatgcgtgatcgtaacctttcactttgcgctgatcgtcgtcggcaagaaactcactggcgatgattttggcgctgcggaaatcaaaagacgttccggcgacagatttcaggccgtcgtgcggaatgccgccttcatcaaccggcagatattcgtccgccagaatctgcaacttgtgattgcgcacgtcagactgctcgccgtcaagattgaaatagacgtgattagtcatattcaccgggcaaggtttatcaactgtggcgcgataagtaatggagatacggttatcgtcggtcagacgatattgcaccgtcgcgccgagattacccgggaagccctgatcaccatcatctgaactcagggcaaacagcacctgacgatcgttctggttcacaatctgccagcgacgtttgtcgaacccttccggcccgccgtgcagctggttaacgccctgacttggcgaaagcgtcacggtttcaccgtcaaaggtataacggctattggcgatacggttggcataacgaccaatagaggcccccagaaacgcggcctgatcctgatagcattccgggctggcacagccgagcagcgcctcgcggacgctgccatcggaaagcggaatacgggcggaaagtaaagtcgcaccccagtccatcagcgtgactaccatccctgcgttgttacgcaaagttaacagtcggtacggctgaccatcgggtgccagtgcgggagtttcgttcagcactgtcctgctccttgtgatggtttacaaacgtaaaaagtctctttaatacctgtttttgcttcatattgttcagcgacagcttgctgtacggcaggcaccagctcttccgggatcagcgcgacgatacagccgccaaatccgccgccggtcatgcgtacgccacctttgtcgccaatcacagctttgacgatttctaccagagtgtcaatttgcggcacggtgatttcgaaatcatcgcgcatagaggcatgagactccgccatcaactcgcccatacgtttcaggtcgccttgctccagcgcgctggcagcttcaacggtgcgggcgttttcagtcagtatatgacgcacgcgttttgccacgatcgggtccagttcatgcgcaacagcgttgaactcttcaatggtgacatcacgcagggctggctgctggaagaaacgcgcaccggtttcgcactgttcacgacgggtgttgtattcgctgccaaccagggtacgtttgaagttactgttgatgatgacgacagccacacctttgggcatggaaactgctttggtccccagtgagcggcaatcgatcagcaaggcatgatctttcttgccgagcgcggaaattagctgatccatgatcccgcagttacagcctacaaactggttttctgcttcctgaccgttaagcgcgatttgtgcgccgtccagcggcagatgataaagctgctgcaatacggttccgaccgcgacttccagtgaagcggaagaacttaacccggcaccctgcggcacattgccgctgatcaccatgtccacgccgccgaagctgttgttacgcagttgcagatgtttcaccacgccacgaacgtagttagcccattgatagttttcatgtgcgacaatgggcgcatcgagggaaaactcgtcgagctgattttcataatcggctgccatcacgcgaactttacggtcatcgcgtggtgcacaactgatcacggtttgataatcaatcgcgcagggcagaacgaaaccgtcgttgtagtcggtgtgttcaccaatcaaattcacgcggccaggcgcctgaatggtgtgagtggcagggtagccaaatgcgttggcaaacagagattgtgttttttctttcagactcatttcttacactccggattcgcgaaaatggatatcgctgactgcgcgcaaacgctctgctgcctgttctgcggtcaggtctcgctgggtctctgccagcatttcataaccaaccataaatttacgtacggtggcggagcgcagcagaggcggataaaagtgcgcgtgcagctgccagtgttgattctcttcgccattaaatggcgcgccgtgccagcccatagagtaggggaaggagcactggaagaggttgtcataacgactggtcagctttttcaacgccagcgccagatcgctgcgctgggcgtcggtcaaatcggtgatccgtaaaacgtgggctttgggcagcagtagcgtttcgaacggccaggcagcccagtaaggcacgacggctaaccagtgttcggtttcgacaacggtacggctaccgtctgccagctcgcgctgaacataatccaccagcattggtgatttctgttcggcaaaatattctttttgcaggcggtcttcgcgctcagcttcgttaggcaggaagctatttgcccaaatctgaccgtgcggatgcgggttagagcagcccatcgccgcgcctttgttttcaaaaacctgcacccatgggtacgttttccccagttctgcggtttgctcctgccaggttttgacgatttccgtcaatgctgcaacgctgagctctggcagcgttttactgtgatccggtgaaaagcagatcacccggctggtgccgcgcgcgctctggcaacgcatcagcggatcgtgactttctggcgcatctggcgtgtcagacatcaaagccgcaaagtcattagtgaaaacgtaagtcccggtgtaatcggggtttttatcgcctgtcacccgcacattacctgcgcagaggaagcaatctggatcgtgcgcaggtaacacctgtttggctggcgtttcctgcgccccctgccaggggcgcttagcgcggtgcggtgaaaccagaatccattgcccggtgagcgggttgtagcggcgatgtggatgatcaacgggattaaattgcgtcatggtcgttccttaatcgggatatccctgtggatggcgtgactgccagtgccaggtgtcctgcgccatttcatcgagtgtgcgcgttacgcgccagttcagttcacggtcggctttgctggcgtccgcccagtaggccggaaggtcgccctcgcgacgcggtgcaaaatgataattaaccggtttgccgcaggctttgctgaaggcattaaccacgtccagcacgctgttgcctacgccagcgccgaggttgtagatgtgtacgcctggcttgttcgccagtttttccatcgccacgacgtgaccgtccgccagatccattacgtggatgtaatcgcgtacgccagtaccatcttcggtcggataatcgttaccaaaaatcgccagcgagtcgcgacggcctacagcaacctgggcgatgtatggcatcaggttattcggaatgccttgcggatcttcgcccatatcgcccgacggatgcgcgccaaccgggttgaagtagcgcagcagggcaatgctccagtccggctgggctttttgcagatcggtgaggatctgttccaccatcagcttgcttttgccgtaagggctttgcggtgtgccggtcgggaagctttcaacgtatggaattttgggctgatcgccataaacggtggcggaggagctaaaaataaagtttttgacgttagcggcgcgcatggcgctaatcaggcgcagagtgccgttgacattgttgtcgtaatattccagcggtttttgtaccgattcgcccacggctttcagcccggcgaagtggatcacggtgtcgatagcgtgatcgtgcaggatctcggtcatcaacgcttcgttacgaatatcgccttcaacaaacgttggatgtttgccgcctaaacgctcgataacaggcagtacgctgcgcttactgttacagaggttatcaagaatgatgacatcatgaccgttttgcagtaattgcacacaggtatgacttccaatgtaaccgctaccaccggtaaccagaactctcataattcgctccattaggcttatggtatgaaataaccatagcataacaaagatgcgaaaagtgtgacatggaataaattagtggaatcgtttacacaagaatttagccgttttttatgcgcgattaagtgattataaaacagagggtttatgaatgattgcgctttttatctgaaaaaagacgcggtttcatgcctgcatgcgtcgaaccgttggccggagagggtgctaaggccgcctccggcaaggtcagcactaccgactcaatatatttttgtcagcacatagcgatagagtccaccgtccggcacgaactcaagacgatgggtaatacaggcaggcgcatcttcagcgtggtgcgaaacaaacaacaattgcgtttcaccttcgctaatcagcacatcaacaaaacggcggataagctggcgattcagcggatcaagcccctgtagtggttcatcgagaataagcaacgtcggatgtttcaccagtgcgcggacaatcagcgccagacgctgctgtccccaggaaagactatggaacggagcgtcagccgtgcgtttatcaatgccgagaatatccagccactgctgcaccagtttttgctggcgatccgaaacggcctgataaatgccaatcgaatcaaaatagccagaaagaatcacattacgcacggtagtgctgacccggtaatccagatgcaaactactgctgacgtaaccgatatgctttttgatatcccagatggtttcgccgctgccgcgacgtcgtccgaaaagcgtcaaatcgttgctgtaaccttgcggatgatcgccagtaaccaggcttaataacgtcgattttcctgcaccatttggcccgacaatttgccagtgttcgcctggattcacctgccagctaaggttattaagaatggggcgatcgttataagaaaccacgccattgttcagcacaatgcgcggttcgttggcgggtaaggcgtgacgtgctgaaggttcatccggctccggcagttgcacaccttcaagctgttcactatgcgccagttgcgcgacgagtgcttgttggagcagttcctctttagcgccagtttccgctaacgtgcaatccgccagcacgccagcaaactggacaaactccgggatctcatcgaagcgattgagcaccagtaccagagtaataccggactgatgtaacgaggcgagtcgctcagccagctgctgacgtgaggcaacatccaggccatcgaacggctcatcaagaatcaacaagtcaggctccgacatcagcgcctgacacagcagggtttttcgcgtctcgccagtggaaaggtatttaaagcgtcggtcgaggagggcggtaataccgaactgctgcgccagttgcatgcaacgcggtgcatcctttacttcatcctgaatgatctcagccgtagtgcgtccggtgtcatcttcgccagggccgagcatatcggtgttattccgctgccattcgtcgctgacgagtttttgcaattgctcgaaggagagacgagtgatgtgggaaaactggctttgccgttcacctttcaaaagcggaagttcccccgccagcgcgcgggccagggccgatttcccgcttccattcgaaccgacaaacgcccaactatcacccgcgtttaacgttagctgaggcaattgcagcgtttttgtgtcgctaagacgaaacgtgccttgcaaaatttgcaacgatgacattttatatcccactttgtgcagcgattactgacagggatacgtgtttcataacaaattgtcaacacgcttagcacagcgtggcgataatcacgctgtcggcattaaagtaggccgtgacattctgtccttgctgaagagaagtcgcttcatttaccggcactgtggcgcacagtgtttgcccgtcgggtagcgccattaatacttcgcactgctctgcgccgcgctcaatatgactaataatacccggtaattggttgtcagcgttttgcgcgaccgcctcgtcctgagtaatacctacccacggcgcttttagcaatatcaacacttctttgccttcatccagccccagacgcgcgccgctttgtgcggtaattgcgactttcaggcgtgtttttccgtcagccagtaagacatcaacatgctgttgaacgtcatcatgatcgcgggcggtgatggtaccgaaccactggttacgggcgctggtttgcagtgaaaaacgtgagatcgcggccagcaggctgttcagcggcagggcgtcatcgtcacttaacacatcaaaggctttttgctggatttgcgccagtaagtcatagagctgaatcagtcgctgaccatagcgggtcagtactgcgccgccgccacctttaccgcctgttgcgcgctcgaccagaatatgctcacttaactgattcatctcgttaatggcatcccaggcgcttttatagctaataccggcatctttcgctccctggctaatggaaccggaaagcgcaatgtgttttagtagcgaaatgcggcgcgggtcggcgaataatttttgttggagcttaagggtgagaaggatttcggcctgcataacaatgtcctggcaaaagtcttattgtgacggaaaacgaacgccacgcaaagctgaccgcacaaaaggggagtgcttttctgtgcttagcggttagaatagtctcatgactatatctggagttgaccatgttagagttattaaaaagtctggtattcgccgtaatcatggtacctgtcgtgatggccatcatcctgggtctgatttacggtcttggtgaagtattcaacatcttttctggtgttggtaaaaaagaccagcccggacaaaatcattgattccctgaatgcccgcttagtcgggcattttctttttctcaacttcctgcttttcctgccgatattttttcttatctacctcacaaaggttagcaataactgctgggaaaattccgagttagtcgttatattgtcgcctacataacgttacattaaggggttaccaatggctcgtaaatggttgaacttgtttgccggggcggcactctctttcgctgttgctggcaatgcactggcagatgaagggaaaatcacggtgttcgccgccgcatcactgactaacgcaatgcaggacattgctacgcagtttaaaaaagagaaaggcgtggatgtggtttcttctttcgcttcgtcatctactctcgcccgtcagattgaagcgggtgcgcctgcggatctgtttatttctgccgatcagaaatggatggattatgcggttgataaaaaagcgatcgatacagctacgcgtcagacactgctcggcaatagcctggtcgttgtagcaccgaaagccagcgtgcagaaagatttcaccatcgacagcaaaaccaactggacttcactgctgaatggcggtcgcctggcggttggcgatccggaacatgttcccgctggcatttatgcaaaagaagcactgcaaaaactgggcgcatgggatacgctctctccgaaactggccccagcggaagatgttcgtggggcgctggcgctggtcgaacgtaacgaagcgcctctgggcattgtctacggttctgacgcagttgccagcaaaggggtaaaagtggttgccaccttcccggaagattcacataaaaaagtggaatatccggttgctgttgtggaagggcataacaatgcgacagtgaaagcattttatgattatctgaagggaccgcaggcagcggaaatctttaaacgttacggatttacaatcaagtaatgatactgaccgatccagaatggcaggcagttttattaagcctgaaagtttcttccctggctgtgctgtttagcctgccgtttgggatcttttttgcctggttactggtgcgttgcacgtttccgggcaaagctctgctcgacagcgtactgcatctaccgctggtgttaccgcccgtggtcgtcggttacttattattagtttcgatgggacggcgcggatttatcggtgaacgtctgtatgactggtttggtattaccttcgcctttagctggcgcggcgcggttctcgctgccgccgtcatgtcgtttccgctgatggtgcgggcaattcgtctggcgctggaaggggttgatgtcaaactggaacaggccgcaagaacactgggggccgggcgctggcgcgttttctttactatcacgttaccgctgaccttaccgggaattattgttggtacggtactggcttttgctcgttctctcggtgagtttggtgcaaccatcacctttgtgtcgaacattcctggtgaaacgcgaaccattccttctgccatgtataccctgatccagacccccggcggggaaagtggagcggcgagactgtgcattatttctattgcgctggcgatgatctccctgttgatttcagaatggctggccagaatcagccgtgaacgggcggggcgctaatcatgctggaactgaatttttcccagacgttgggcaaccattgcctgactattaatgaaacgctgcccgccaatggcatcactgctatctttggcgtctccggtgccggaaaaacttcgctgattaacgccatcagtggactgacgcgcccgcaaaaagggcggattgtcctcaatgggcgggtactaaatgatgccgaaaaaggtatctgcctgacgccggaaaagcgtcgcgttggctatgtttttcaggatgcgcggctgttcccgcattacaaagtgcgtggcaatctgcgctacggcatgtcgaaaagtatggtcgatcagttcgataagctggtggcgcttttaggcattgaaccgttgcttgaccgtttaccaggcagcctgtccggaggcgaaaaacagcgcgtggcgattggtcgggctttgctgacagcaccggaattgctgttgctggatgaaccgctggcgtcactggatattccgcgtaaacgcgaactgttgccttatctgcaacggctgacacgggaaatcaacattccgatgttgtatgtcagccattcgctggatgagatcctccatctggcagacagagtgatggtactggaaaacggtcaggtgaaagcctttggcgcgctggaggaagtgtggggcagtagcgtgatgaatccgtggctgccgaaagagcaacaaagtagcattctgaaagtgacggtgcttgagcatcatccgcattacgcgatgaccgcgctggcgctgggcgatcagcatttgtgggtcaataagctggacgaaccgctgcaagctgcgctacgtatccgcattcaggcttccgatgtttctctggttttacaaccgccgcagcaaaccagcattcgtaacgtattgcgggcaaaagttgttaatagttatgacgacaacggccaggtggaagtggaactggaagtcggcggtaaaacgctgtgggcgcgtatcagcccgtgggccagggatgaactggcgatcaaacctggcctgtggctgtacgcgcaaattaaaagtgtgtcgataaccgcctgattaaatcaggtggctataaatgaactgggcaatgctgtcggtggtgttatcaccaatcacaatgttggcgcgcgcttttaccgcgtcatcggcgttgcccatcgccacgcctgtaccagcggcttccagcatactgatatcattaaagttatcgccgaatgccacgacgttttccatcgaccaaccttgcgcctcaacccatttcgtcaaacgtttacctttgctgttgccgccgcgtgcaatatcaacctgatcgtgccaggaccattcacactccagtcccagttcatgttcgacatgcttaccaaaatgctgcaattgcggcaggtcatcgtgcgtcagggcgaacttccatacggcgttaacttgttgcgccgtttcagccagagaagcgacttgtgtgaaagtcggacgctgttccggcggcagggtttgcgcccagttagatgtgcgaatgacatgcccggtcgggtgctcatagaccattgcatcatcgacatacatcagaccgtgaatgtggtgttcattcagcatctcaatgagttgcagggctttaataacgggcattgggtccgcttccagcacggtttttgcatgataatcatacaaataggtgccattacagcaaatagcaggtgtatccagcgccagcgcctgataaaaaggatgaatagcgacgtgatggcgacctgtgacgatgattaattgatagcctgcttcgcgagcgcgggccagggcttctatcgatgaaggaagcagggtctttttcggggtcaataaggtgccgtctaagtcgagagcaatcacgcgtgtggtcatggcgtattccagattaaggttaagaattttcgtctgcgcgaatggtacaccgataccactatcggacaaaattctgcgttttaattcagcattcaccgccaaaagcgactaattttagctgttacagtcagttgctaaatgcaaaggagcattcatgaagcaaacagtttatatcgccagccctgagagccagcaaattcacgtctggaatctgaatcatgaaggcgcactgacgctgacacaggttgtcgatgtgccggggcaggtgcagccgatggtggtcagcccggacaaacgttatctctatgttggtgttcgccctgagtttcgcgtcctggcgtatcgtatcgccccggacgatggcgcactgacctttgccgcagagtctgcgctgccgggtagtccgacgcatatttccaccgatcaccaggggcagtttgtctttgtaggttcttacaatgcgggtaacgtgagcgtaacgcgtctggaagatggcctgccagtgggcgtcgtcgatgtggtcgaggggctggacggttgccattccgccaatatctcaccggacaaccgtacgctgtgggttccggcattaaagcaggatcgcatttgcctgtttacggtcagcgatgatggtcatctcgtggcgcaggaccctgcggaagtgaccaccgttgaaggggccggcccgcgtcatatggtattccatccaaacgaacaatatgcgtattgcgtcaatgagttaaacagctcagtggatgtctgggaactgaaagatccgcacggtaatatcgaatgtgtccagacgctggatatgatgccggaaaacttctccgacacccgttgggcggctgatattcatatcaccccggatggtcgccatttatacgcctgcgaccgtaccgccagcctgattaccgttttcagcgtttcggaagatggcagcgtgttgagtaaagaaggcttccagccaacggaaacccagccgcgcggcttcaatgttgatcacagcggcaagtatctgattgccgccgggcaaaaatctcaccacatctcggtatacgaaattgttggcgagcaggggctactgcatgaaaaaggccgctatgcggtcgggcagggaccaatgtgggtggtggttaacgcacactaaccgctgatttacccggcgcagtctctcctgcgccggtgtattaacctatctcctgtaacgcgtgtctctggcgttcgacgatattggtccacaaattgtctttatcgtcagtccataaattaatcagcaaggcaaaaaagcgttctgctgctggagaaagtacggcatctttacggcgaattattcccaatgttcgacgtataacgggttccaccaatgggataccaataatcgaagaatagggcgcatgaggcattgccaggccaggaagcgccgaaatccccagtcccgcctccaccagtcctaatgacgtcgaaagatgacgcacttcgtaaaaccagtccagcttccagggcttgtcggccagctgttgttctatcaacagtcggttgccgctggaggagcgtacgccaatcattttgtaacccactaactcctgccattctacaagctgctttttggccaatggatggtcacgccgacaggccagcacgaacggctcgttgaccagtggggtaaaatcaatggatgaatttgtgacgttgttcatgtttatgccaaagtctgattcgttacacagcaccgattccatgcaattattcgtgccttgttccagaatccgcactttaatattgggatacagctcattaaatttaccgattgccagcggtaaaaaataaaatactgcggtcggaatacacgctaacgtcaccataccacgatgataagcattcatatcacgaatattaaaaagcgtttcatcgaatttctttattaattcccgcgcctccgggagcaacctttttcctgcttttgttaacgtaaccttgcgagttgtacgctcaaatagttgaacatgtaaatcttcctccatcttttttattcttcgcgttaatgcaggttgcgtaatattgagtaatttagcggcattgttaaacgaactggactctgccagtatgacaaatgccttcatacttgataattcatgcttcattattactccggaaaatggaagcgacgattttgggtggctggccgttaaaaattttaactgcatttagccaacttaaattaatgaaaaaatgttattaatcgttgagctaaagtcattagagatgctttgcccttaatgtaaccatatcgcaataagttatgtttttaaattgagggcattattatgaaaaaaataccctgcgtgatgatgcgaggtggaacctcgaggggcgcgttcctgttagcggaacatttacccgaagatcaaacgcagcgcgataaaatattgatggcaattatgggttccggtaacgatctggaaattgacggtattggcggcggtaatccactgaccagtaaagtcgccattattagccgttccagcgatccgcgtgctgatgtcgattatctgtttgcgcaggtaatcgttcatgagcaacgtgtcgataccacgcctaactgcggcaatatgctgtctggtgttggggcattcgccattgaaaatggtttgattgcagcgacttcgccagttactcgcgtacgtatccgcaacgtcaatacgggtacgttcatcgaagctgatgtgcaaacgccaaatggtgttgtcgagtacgagggtagcgccagaattgacggcgtaccgggtactgccgcaccggttgcgctcactttcctgaatgccgctggaaccaaaaccggaaaagttttcccgactgataatcagattgattattttgacgatgtcccggtgacctgtatcgatatggcgatgccagtcgtcattattccggctgaatatctgggaaaaacaggttatgaattaccggcggaactggatgccgacaaagcattattagcccgcattgaatctatccgtctacaagcgggtaaagcaatgggcttaggtgatgtcagtaatatggttatccctaaacctgtgcttatttctccagcgcagaaaggcggggcaattaatgtgcgttattttatgccgcattcttgccatcgcgcgctggcgataaccggtgctattgctatttccagtagttgtgcattggaaggcaccgtcacccgacaaatcgtcccttctgtaggatacggcaatatcaatattgaacaccccagtggtgcgctcgacgttcatttaagtaatgaaggtcaggatgccacgacgttacgcgcatctgttattcggacgaccagaaaaatattttccggtgaagtttatcttccctgaaaaaattcgttgtcaggataaggacaatcaataaaggacttctgtatgagtcatacagaaagaacaggattttaaatgaataagaaatcgttatggaagctaattctgatattagcgatcccatgtattattggttttatgccagctccggcaggattaagcgaactggcgtgggtgctttttggtatttacctggcggccattgtggggctggttatcaagcctttcccggaacctgtcgtactgttaattgccgttgctgcctcaatggtggtggtcggtaacttatccgacggtgcgtttaaaaccaccgccgtattaagcggttactcttcaggtaccacctggctggtgttctcggcgtttaccttaagcgccgcatttgtgaccaccggtttaggtaaacgtattgcctatctgctgattggtaaaatcggtaacaccacgctgggtctgggttacgttacggtattcctcgatctggtactggctccggcaacaccgtctaacaccgcgcgtgcgggcggcattgtgttaccgatcatcaacagcgtggcggtggctttggggtccgaaccggaaaaaagtccgcgtcgtgtcggacattacctgatgatgtccatttacatggtcaccaaaaccaccagctatatgttctttaccgcaatggcggggaacattctggcgctgaaaatgatcaacgacattctgcacctgcaaattagctggggtggatgggcgctggcagccggattgccgggcatcattatgctgctggtcaccccgctggtgatttacaccatgtatccaccagaaattaagaaggtggataacaaaaccatcgctaaagcgggccttgccgaactaggaccgatgaaaatccgcgaaaaaatgctgctcggtgtctttgtgctggcgctgctgggctggattttcagtaagtctctgggggttgatgaatccaccgtggcaatcgttgttatggcaaccatgctgctgctgggtatcgttacctgggaagacgtggttaaaaataaaggcggctggaataccttaatctggtacggcggtattatcggcttaagctccttattatcgaaagttaaattcttcgaatggttagctgaagtctttaaaaataacctggcatttgatggtcacggtaacgttgctttcttcgttattattttcctcagcattatcgtgcgttatttcttcgcttccggtagtgcctatatcgttgctatgttaccggtatttgccatgctggcgaacgtctccggcgcaccgttaatgttaaccgcgctggcactgttgttctccaactcctatggcggcatggttactcactatggcggcgcggcaggtccggtcatctttggcgtgggttataacgatattaaatcctggtggttggtcggtgcggtactgacgatattaaccttcctggtgcatatcaccctcggcgtgtggtggtggaatatgctgatcggctggaacatgctgtaaatattctcgtcatacttcaagttgcatgtgctgcgtctgcgttcgctcaccccagtcacttacttatgtaagctcctggggattcactcgcttgtcgccttcctgcaactcgaattatttagagtatatccatttattatctttctgcgcacttcacggtgcgcagatatctggagcatttgatgatcaagttatctgaaaaaggcgtgtttctcgccagtaataacgaaataattgccgaagaacatttcaccggcgaaattaaaaaagaagaagccaaaaaaggcactattgcctggtctattctctcttcgcataatacgtccggaaatatggataaacttaaaattaagtttgattcattagcctctcacgatattacctttgttggtattgtacagaccgctaaagcgtccggtatggaacgtttcccgctgccgtatgtgctgaccaactgccataactcactctgcgccgtcggcggcactattaacggtgatgaccatgtttttggtttatcggcggcccagcgttatggcggtatttttgtgcctccgcatattgcggtcatccatcaatatatgcgtgagatgatggcaggcggcggcaaaatgatcctcgggtcagacagccacacccgttacggtgcattagggacaatggcagtcggtgagggcggcggtgagttggtaaaacagctgcttaatgacacctgggatatcgactatccgggcgtggttgcggtgcatctgaccggaaaacctgcgccgtatgtggggccacaggatgtggcgctggctatcattggcgcggtgttcaaaaacggttacgtcaaaaacaaagtcatggagttcgttggaccgggcgttagcgcgctctctaccgatttccgtaacagcgttgacgtgatgaccactgaaacgacctgtttaagttctgtctggcaaaccgatgaagaagtccataactggctggcgctgcacggtcgcggccaggattactgccagcttaaccctcaaccgatggcgtactacgatggctgcatcagcgttgatttaagcgccatcaaaccaatgattgcgctgccgttccacccgagcaacgtgtatgaaatcgacacactgaaccagaacctgaccgacattctgcgtgagattgaaattgagtccgaacgcgtggcgcacggtaaagccaaactctcgctgctggataaagtggaaaatggtcgcctgaaagtgcagcaggggattatcgcgggctgttctggcggtaactacgaaaacgtcatcgcggcggcgaatgcactgcgcggtcaatcctgtggcaatgacaccttctcgctggcagtttacccgtcatcacagccggtgtttatggatctcgccaaaaaaggtgtggtagcagatttgattggcgcaggcgcaatcatcagaaccgcgttctgcggcccatgctttggcgcgggcgatacgccaatcaacaacggtttgagtattcgccacaccacgcgtaacttcccgaaccgcgaaggctctaagccagctaatgggcagatgtcagcggtggcgttgatggacgctcgttctatcgctgcgactgcggcaaacggtggctatttaacctctgccagcgaacttgattgctgggacaacgtgccggagtacgccttcgatgtaacgccgtataaaaaccgtgtttatcagggctttgtgaaaggggcaactcagcaaccgctgatttacgggccgaacattaaagactggccggaattgggtgcgctgactgacaatatcgtcctgaaagtgtgctcgaagatcctcgacgaagtgaccaccaccgacgaactgattccttccggtgaaacctcttcttatcgttcaaatccgattggtctggcggagtttaccctgtctcgccgcgatcccggttatgttagcagaagtaaagcgactgctgagctggaaaatcagcgtctggcggggaatgtcagcgagctgacagaggtgtttgcgcgcattaagcagattgctggtcaggagcatattgatccgctgcaaactgaaattggcagcatggtctatgcggtgaaaccaggcgatggttctgcgcgtgaacaggcggcgagctgccagcgtgtgattggcggtctggcgaatattgccgaggagtacgcgactaaacgctatcgttctaacgtcatcaactgggggatgttaccgctgcaaatggcggaagtaccaacctttgaagtgggggattacatttacatccctggcattaaagcggcgctggataatccgggtacgacgtttaaaggttatgtgatccatgaagatgcgccggtaacggaaattacgctctatatggaaagtctgactgctgaagagcgcgagattatcaaggcgggtagtttgattaacttcaataaaaaccgtcagatgtaaaaagcgccatgtgaatgtaggtcgcattcggcacttattgtcggatgcgatgcttgcgcatcttatccgacctacgaatcgcatcgaatctgtaggccagataaggcattttcgcagcatccggcacttattgtcggatgcgatgcttgcgcatcttatccgacctacaaatcgcatcgaaccgtaggccggataaggcgtttacgccgcatccggcaaatagttaattgctcttacttcttcgcctctgcaaccactttactacccacgccgcggttattgtattcccacatgcggttgtagttagtgtcattcagattgcgctgtatttcgtcgttatcatctacgctgccggtattacccgcaaacggacgattagagatcaccgcatcggcccacggtttagccgtgttaaaaccttcgttgatggcgctatcacggatcaccacctgaccgttggtattggcatcaacatccagcgagcggcccagttgcgccacaccatcaccgaaagcattgaaacggctgtttacggcgaggaaaccgtagtaaatgttggacagcgtagccggtgcaaacacatacgcttcttgctgagtacgtgagttcaccacgcggaattcggtgttatcgaacaccactgcgccgcgaccagaaacgatatccacatccccttcaatgtagctgttggtcaccagcgtacgcggctgacgattcgtttccagacggttctgcacaccgctgttggtgacaaagaaggtgttctgacgaccgagaatgttaacgttgttaatctgtacctggtcaccatcagtacgcagtgccaccgccggatggttacctgcatctacgctatcgcccagcgtgttttcgatggtcagattttgcagttgcaggccattgttttgtgaccagaagaccgcagagcagagaacaccgatactgtcgctgcgtttgctctggcagctatcgtacatataccacgctggtttacctggcatatatttgccgcgcgggttgacgtcgtgacgccagtcggcagggctcatgccaccatcaagggaaagcccaatcttcacatcaatcggtttttcacctgtaccgtacagagtaattccacccggagcggcagggacatataccgttccctgatactcaccaggcatcacggcaatatactggcgcttgttggtacgcttgataattgccgcatctaccgccgcctgaatcgtggtatgcgttacaccttgagtgcccgccgggccgacaacaaagtcaggttgcgcaggcagggtaatcggggaaggattccacgctgcagcacctggtgtcagggatgcaaaatagtgttgagcatcgaaattctgcgcttcttttgccgacagaatcgggcgagaagaggtaccaggcgcggtttgatcagaaggacgttgatcgggcggggttgagctacaggcggtcagcgtcacgccaaaagccaatgccagcgccagacgggaaactgaaaatgtgttcacaggttgctccgggctatgaaatagaaaaatgaatccgttgaagcctgcttttttatactaacttgagcgaaacgggaaggtaaaaagacaaaaagttgtttttaatacctttaagtgataccagatggcattgcgccatctggcagagtgattaactaaacatcgcagtaatcgaggcgcttgccagagagtggaaatgaacgttaaacccgaccatcgcgccgctggcaccttcatcgacatcaatacgttctatatccagcgcgtgaacggtaaaaatgtagcgatgagtttcgcctttcggcggtgctgcgccatcgtacccggttttaccaaagtcggtacgcgtctgcaaaacgccgtctggcattgctaccagaccagagccaaacccttgcggtaatacgcgggtatcagcgggtaagttaacaactacccagtgccaccagccggagccggttggcgcatccgggtcgtagcaggtgacaacaaaacttttcgttcccgcaggaacatcatcccacgccagatgcggtgaaatattatcgccatcgtaacccatgccgttaaagacatgacgatgcggcaatttatcgccatcgcgcagatcgttactgatgagtttcatgaaccctcctttcttgtttgcagaaagtgtagccagaaaccctcacgcggacttctcgttattggcaaaaaaatgtttcatcctgtaccgcgcggttaaccgctgcggtcagacgctgcaactgttgcgggagaataatatagggcggcatcaggtaaatcagtttgccaaaaggccggatccagacaccctgttcgacaaagaatttttgcagcgccgccatattcaccggatgagtggtttcgaccacgccaatggcccccagtacgcgcacatcggcaaccatttcggcatcacgggcgggggcaagttgctcgcgcagctgtacttcaatatccgccacctgttgctgccagtcgccagattcgagaatcgccaggctggcgtttgctgccgcgcaggccagcggattgcccataaaagttggcccatgcataaagcaaccggcttcaccgttactgatggtttctgcaacctcgcgcgtggtgagtgtggcggaaagggtcattgtgccgccggttaaggctttaccgaggcacaaaatgtccggcgcgatttctgcatgttcacaggcaaacagtttcccggtacgaccaaatccagtggcgatctcgtcggcaatcagcaagataccttcgcgatcgcatattttgcggattcgttttaaccattccggatggtacatgcgcatcccgcctgcgccctggacaatcggctcaatgatcaccgccgcgatttcatgacgatgcgccgccatcaggcgggcaaagcccaccatatcgcgctcatcccattcgccatccatgcggctttgcggggcgggagcaaacaggttttctggcaggtagcctttccacagactgtgcattgagttatccggatcgcacaccgacatcgcgccaaaggtatcgccatgataaccattgcggaaggtcagaaaacgctggcgcgcttcgcctttggcttgccagtactgcaacgccattttcatcgccacttccaccgctacggaaccggagtccgcgagaaaaacgcactccagcggttgcggcgtcatcgccaccagtttgcggcacagctcaatggctggcgcatgggtgataccgccaaacatcacatgcgacatggcatcaatttgcgacttcatcgccgcattaagctgcgggtgattgtagccgtggatcgccgcccaccaggacgacataccgtcaaccaggcgtctgccgtcagacaaaatcagctcgcaaccttcggcgctcaccaccggataaaccggcagaggggaggtcatggatgtgtatgggtgccagatatggcgttggtcaaaggcaagatcgtccgttgtcataatcgacttgtaaaccaaattgaaaagatttaggtttacaagtctacaccgaattaacaacaaaaaacacgttttggagaagccccatggctcaccgcccacgctggacattgtcgcaagtcacagaattatttgaaaaaccgttgctggatctgctgtttgaagcgcagcaggtgcatcgccagcatttcgatcctcgtcaggtgcaggtcagcacgttgctgtcgattaagaccggagcttgtccggaagattgcaaatactgcccgcaaagctcgcgctacaaaaccgggctggaagccgagcggttgatggaagttgaacaggtgctggagtcggcgcgcaaagcgaaagcggcaggatcgacgcgcttctgtatgggcgcggcgtggaagaatccccacgaacgcgatatgccgtacctggaacaaatggtgcagggggtaaaagcgatggggctggaggcgtgtatgacgctgggcacgttgagtgaatctcaggcgcagcgcctcgcgaacgccgggctggattactacaaccacaacctggacacctcgccggagttttacggcaatatcatcaccacacgcacttatcaggaacgcctcgatacgctggaaaaagtgcgcgatgccgggatcaaagtctgttctggcggcattgtgggcttaggcgaaacggtaaaagatcgcgccggattattgctgcaactggcaaacctgccgacgccgccggaaagcgtgccaatcaacatgctggtgaaggtgaaaggcacgccgcttgccgataacgatgatgtcgatgcctttgattttattcgcaccattgcggtcgcgcggatcatgatgccaacctcttacgtgcgcctttctgccggacgcgagcagatgaacgaacagactcaggcgatgtgctttatggcaggcgcaaactcgattttctacggttgcaaactgctgaccacgccgaatccggaagaagataaagacctgcaactgttccgcaaactggggctaaatccgcagcaaactgccgtgctggcaggggataacgaacaacagcaacgtcttgaacaggcgctgatgaccccggacaccgacgaatattacaacgcggcagcattatgagctggcaggagaaaatcaacgcggcgctcgatgcgcggcgtgctgccgatgccctgcgtcgccgttatccggtggcgcaaggagccggacgctggctggtggcggatgatcgccagtatctgaacttttccagtaacgattatttaggtttaagccatcatccgcaaattatccgtgcctggcagcagggggcggagcaatttggcatcggtagcggcggctccggtcacgtcagcggttatagcgtggtgcatcaggcactggaagaagagctggccgagtggcttggctattcgcgggcactgctgtttatctctggtttcgccgctaatcaggcagttattgccgcgatgatggcgaaagaggaccgtattgctgccgaccggcttagccatgcctcattgctggaagctgccagtttaagcccgtcgcagcttcgccgttttgctcataacgatgtcactcatttggcgcgattgcttgcttccccctgtccggggcagcaaatggtggtgacagaaggcgtgttcagcatggacggcgatagtgcgccactggcggaaatccagcaggtaacgcaacagcacaatggctggttgatggtcgatgatgcccacggcacgggcgttatcggggagcaggggcgcggcagctgctggctgcaaaaggtaaaaccagaattgctggtagtgacttttggcaaaggatttggcgtcagcggggcagcggtgctttgctccagtacggtggcggattatctgctgcaattcgcccgccaccttatctacagcaccagtatgccgcccgctcaggcgcaggcattacgtgcgtcgctggcggtcattcgcagtgatgagggtgatgcacggcgcgaaaaactggcggcactcattacgcgttttcgtgccggagtacaggatttgccgtttacgcttgctgattcatgcagcgccatccagccattgattgtcggtgataacagccgtgcgttacaactggcagaaaaactgcgtcagcaaggctgctgggtcacggcgattcgcccgccaaccgtacccgctggtactgcgcgactgcgcttaacgctaaccgctgcgcatgaaatgcaggatatcgaccgtctgctggaggtgctgcatggcaacggttaataaacaagccattgcagcggcatttggtcgggcagccgcacactatgagcaacatgcagatctacagcgccagagtgctgacgccttactggcaatgcttccacagcgtaaatacacccacgtactggacgcgggttgtggacctggctggatgagccgccactggcgggaacgtcacgcgcaggtgacggccttagatctctcgccgccaatgcttgttcaggcacgccagaaggatgccgcagaccattatctggcgggagatatcgaatccctgccgttagcgactgcgacgttcgatcttgcatggagcaatctcgcagtgcagtggtgcggtaatttatccacggcactccgcgagctgtatcgggtggtgcgccccaaaggcgtggtcgcgtttaccacgctggtgcagggatcgttacccgaactgcatcaggcgtggcaggcggtggacgagcgtccgcatgctaatcgctttttaccgccagatgaaatcgaacagtcgctgaacggcgtgcattatcaacatcatattcagcccatcacgctgtggtttgatgatgcgctcagtgccatgcgttcgctgaaaggcatcggtgccacgcatcttcatgaagggcgcgacccgcgaatattaacgcgttcgcagttgcagcgattgcaactggcctggccgcaacagcaggggcgatatcctctgacgtatcatctttttttgggagtgattgctcgtgagtaaacgttattttgtcaccggaacggataccgaagtggggaaaactgtcgccagttgtgcacttttacaagccgcaaaggcagcaggctaccggacggcaggttataaaccggtcgcctctggcagcgaaaagaccccggaaggtttacgcaatagcgacgcgctggcgttacagcgcaacagcagcctgcagctggattacgcaacagtaaatccttacaccttcgcagaacccacttcgccgcacatcatcagcgcgcaagagggcagaccgatagaatcattggtaatgagcgccggattacgcgcgcttgaacaacaggctgactgggtgttagtggaaggtgctggcggctggtttacgccgctttctgacactttcacttttgcagattgggtaacacaggaacaactgccggtgatactggtagttggtgtgaaactcggctgtattaatcacgcgatgttgactgcacaggtaatacaacacgccggactgactctggcgggttgggtggcgaacgatgttacgcctccgggaaaacgtcacgctgaatatatgaccacgctcacccgcatgattcccgcgccgctgctgggagagatcccctggcttgcagaaaatccagaaaatgcggcaaccggaaagtacataaaccttgccttgttgtagccattctgtatttggttaaattgcgagcgagatcgcgtcttcgattgactgcaatttaaccaattaaattctaaaataatcacgaaaaaaattttacttccgcctcatgcggcgaatgtgggaattgcccaggcggcgggggataggggctggagacagttatccactattcctgtggataaccatgtgtattagagttagaaaacacgaggcaagcgagagaatacgcggcttgcacgcgaattggcgttaaagacggctcaaagaaatatcttttattttttaactggttagataaatgcaatggcagtcactgaacaggcatctcttgccataaaactgtcatcactcatcttgacaaatgttaaaaaagccgttgctttggggataacccggtaaggccggagttttatctcgccacagagtaaattttgctcatgattgacagcggagtttacgctgtatcagaaatattatggtgatgaactgtttttttatccagtataatttgttggcataattaagtacgacgagtaaaattacatacctgcccgcccaactccttcaggtagcgactcatgagtaaaccgttcaaactgaattccgcttttaaaccttctggcgatcagccagaggcgattcgacgtctcgaagaggggctggaagatggcctggcgcaccagacgttacttggcgtgactggctcagggaaaaccttcaccattgccaatgtcattgctgaccttcagcgcccaaccatggtacttgcgcccaacaaaacgctggcggcccagctgtatggcgaaatgaaagagttcttcccggaaaacgcggtggaatatttcgtttcctactacgactactatcagccggaagcctatgtaccgagttccgacactttcattgagaaagatgcctcggttaacgaacatattgagcagatgcgtttgtccgccaccaaagcgatgctggagcggcgtgatgtggttgtggtggcgtctgtttccgcgatttatggtctgggcgatcctgatttatatctcaagatgatgctccatctcacggtcggtatgattatcgatcagcgcgcgattctgcgccgactggcggagctgcaatacgctcgtaatgatcaagcattccagcgtggtactttccgcgttcgtggcgaggtgatagatatcttcccggcagaatcggatgacattgcacttcgcgtggaactgtttgacgaggaagtggaacgattgtcgttatttgacccgctgaccgggcagattgtttccactattccacgttttaccatctacccgaaaacgcactacgtcacaccgcgcgagcgcatcgtacaggcgatggaggagatcaaagaagagctggccgccagacgcaaagtgctgttggaaaacaacaaactgctggaagagcagcggctgacccagcgtacccagtttgatctggagatgatgaacgagctgggctactgttcggggattgaaaactactcgcgcttcctctccggtcgtggaccgggtgagccaccgccgacgctgtttgattacctgcctgccgatgggctgctggtcgtcgatgaatctcacgtcaccattccacaaattggcggcatgtatcgcggtgaccgggcgcgtaaagagacactggtggagtacggcttccgcctgccatcagcgctggataaccgtccgcttaagtttgaagagttcgaagcattagcgccgcaaaccatctatgtttcggcgacgccgggtaattacgagctggaaaaatccggcggcgatgtggtggatcaggtggtgcgtccaaccggattgcttgacccgattatcgaagtgcggccggtggcgacacaggttgatgatcttctttcggagattcgtcagcgagcggcaattaacgaacgcgtactggtcaccacactgaccaagcggatggcggaagatcttaccgaatatctcgaagaacatggcgagcgcgtgcgttatcttcactcagatatcgacaccgtcgaacgtatggagattatccgcgacttgcgtctgggtgagttcgacgtgctggtagggatcaacttactgcgcgaaggtctggatatgccggaagtgtcgctggtggcgatcctcgacgctgacaaagaaggcttcctgcgttccgaacgttcgttgatccagaccattggtcgtgcggcacgtaacgttaacggtaaagcgattctctacggcgataagatcaccccatcaatggcgaaagcgattggcgaaaccgaacgtcgccgtgagaaacagcagaagtacaacgaggaacacggaattacgccgcaaggcttgaacaagaaagtggtcgatatcctggcgctggggcagaacattgccaaaaccaaagcgaagggcagaggaaaatcgcgcccgattgttgagccggataatgtgccgatggatatgtcgcctaaagcgttgcagcagaaaatccatgagctggaagggttgatgatgcaacacgcgcagaatctggagttcgaagaagcggcgcaaattcgtgaccagttgcatcagctgcgtgagctgtttatcgcggcatcgtaacaggatagcgaagaagactgatgacaaacggaaaacagcctgatgcgctacgcttatcaggcctacattttctccgcaatatattgaatttgcgcggtttgtaggccggataaggcgttcacgccgcatccggcataaacaacgcgcactttgtcttcaataggaagccggaattttccttcggatttccgttaacctaaagcctgtaacgccttttccagcgcgttatgtaacaactggcggtcatgacgatacggaatatcgctggcctccagtacctcctggatcacaatccgctctttcaccgccgagacatccacttttggcccgacgatgaccgcatcaatgacctttttaccaacatactgctccataattgccagcttgctttccagcttcaaattagccgcaggtaaactcaactcacgccccagattgccgatataaaccatcggcgctggcgtgcggcgtaatgcctgggcgatttccttcagcagcagaattggcatcaggctggtataaaaactgccaggcccaataatgatgagatccgcttcattgatagcgtgaaccgcctcacgcgttgcgggtacattaggcgttaacaataactcttgaatcggcgtagttaactggtcgatattgacctcgccgtaaacttcatgcccctgatcgtcaatcgccatcagatcaacaggatgctctgacattggaatcaaatgcgtatccactttcagcagattacgaattaaattgatggcttccagaggccgcacgctaaggtgatccagcgcctttaacatcaagtttccgagattatgaccggaaagttcgccattgccaccaaaacggtattcaaacatcgcggaggcgacgctcggttccgttatcagctggttgaggcagttgcgcatatcgccccaggcaatgccgccttctgaacggcgaatacgccccgtcgagccaccattatcggtggtggtgacgatacccgttaaacgagaacccaaagacgaaagtgatgagagaacgcgtcccagtccatgccctccgccgagagcaacgacacgatcaagatcagccagcgtacgattgcgcatatagtttcctggagtcagattatccgcgctacagtagcgcaaattgcggggaaacagcaattaacctgccaatattgaggatacaaactattttcttctacctctaaaggacgatgcacgctatgcctccctgatgatgtatatcaaagtaaaaccgccattttcccttattctgtagcgaaatagcacgatcatgacgctatatacatgattacatagcgaaagtgtggatggtaaaaatctcatttacacgctagtatcggcataaccactaaacactctagcctctgcacctgggtcaactgatacggtgctttggccgtgacaatgctcgtaaagattgccaccagggcgaaggaagaaatgacttcgcctcccgtatctggaaaggtgtacatggcttcacaactgactgatgcatttgcgcgtaagttttactacttgcgcctgtcgattaccgatgtgtgtaactttcgttgcacctactgcctgccggatggctacaaaccgagcggcgtcaccaataaaggctttcttaccgtcgatgaaattcgccgggttacgcgcgccttcgccagactgggcaccgaaaaagtgcgcctgacaggaggagagccgtctttacgccgcgactttaccgatatcatcgccgctgtgcgggaaaacgacgctatccgccagattgcggtcacaaccaatggttaccgtctggaacgcgatgtggcgagctggcgcgatgcgggacttactggcattaacgtcagtgtcgacagtctggacgcccgccagtttcacgctattaccgggcaggataaattcaaccaggtcatggcagggattgatgctgcatttgaggccggttttgagaaggtcaaagtcaataccgtgctgatgcgtgatgttaatcatcaccagctcgacacctttctgaactggatccagcatcgccctatccagctgcgtttcatcgaactgatggaaacgggcgagggcagcgagctcttccgtaagcatcacatctctggtcaggttctgcgtgacgagctactgcgtcgcggctggatccaccaattacgtcaacgcagcgacggtcccgcgcaagtcttttgccatccagattacgccggagagattggccttatcatgccgtatgaaaaagacttctgcgccacttgcaaccgcctgcgcgtttcctccattggtaaactccatctctgcctgtttggtgaaggcggcgttaacctgcgcgatctgctggaagacgatacccagcaacaggcgctggaagcgcgtatttcagcggcgctgcgggagaagaaacagacccatttcctgcatcaaaacaacaccggtattacgcaaaacttatcgtacattggcggctaaaacgtcaaaaggagagatcagatgagtcaggtaagcactgaatttatcccgacccgtattgctattcttacggtttctaatcgtcgcggtgaagaagacgatacctccggtcactatctgcgcgattcggcgcaagaagcgggccatcacgttgtcgataaagccattgtgaaagaaaaccgctacgctattcgcgctcaggtatctgcgtggatcgccagcgacgatgtacaagtggtattgattacgggtggtactggcctgacggaaggtgatcaggctcccgaagcattgctgccgttgttcgaccgtgaagttgaaggttttggtgaagtgttccggatgttgtcgtttgaagagattggcacttccacgttgcaatctcgtgcggtagcgggcgtcgccaacaaaacgctgattttcgccatgccgggttcgaccaaagcgtgccgtaccgcatgggaaaatatcatcgcgccgcagctggatgcccgtacgcgtccgtgtaatttccatccacatttgaagaaataagtatgtcgcaactgacccatatcaacgccgctggcgaagcgcacatggtggatgtctccgccaaagcggaaaccgtgcgtgaagcgcgggcggaagcctttgtcaccatgcgcagcgagacgctggcgatgattattgatggtcgccaccacaaaggcgacgtatttgccactgcgcgtattgccggtattcaggcggcaaaacgcacctgggatctgatcccgctctgtcatccgctgatgctcagcaaagttgaagtcaatttacaggccgagccggagcacaatcgggtgcgtatagaaaccttatgccgcctgaccgggaaaaccggtgtcgaaatggaagcattaaccgcggcctccgtggcggcgctgaccatttatgacatgtgcaaagcggtgcaaaaagatatggtgattggtccggtacgtttgctggcgaagagcggcggcaagtcgggtgactttaaggtggaagcggatgattaaagttctttttttcgcccaggtgcgcgagttggtgggaacagatgcaaccgaagtggctgcggatttcccaactgttgaagcgttacgccagcacatggctgcgcagagcgatcgctgggcgctggcgctggaagatggcaaattactggctgccgtcaaccagacgctggtgagttttgaccatccgctgactgacggcgacgaagtagctttcttcccgccggtaaccggaggttaagatggcagaaaccaaaattgttgttggtccgcagccgttcagcgtaggagaagagtacccgtggctggcggagcgtgacgaagacggtgcggtagtcacctttactggtaaggtgcgcaaccataacctgggcgacagcgtcaacgcattaaccctcgaacactatccggggatgactgaaaaagcactggcagaaattgttgatgaagcgcgtaaccgctggccgctggggcgcgtcactgtgattcaccgcatcggggaattatggccgggcgatgaaatcgtttttgtcggtgtcaccagtgcgcatcgcagcagtgcgtttgaagccgggcagtttattatggattatctcaaaacccgcgcaccgttctggaagcgcgaagccacgccggaaggcgaccgctgggttgaagctcgggagagcgatcagcaggcggcaaaacgctggtagttttttgttagccggataaggcaccgctgcgtccggcaatttcaccgctcagtacatacgtttacgctgcgtcgatgcacagcctcatcattttgcagtatccttaagatattccttatatcttcaggagatcgtcatggacagattcccacgttctgattcaatcgtacaaccccgggctggcttgcaaacttatatggctcaagtctatggctggatgaccgttggcttgttgctgaccgcatttgttgcctggtatgcggctaattccgcggccgtgatggagctgttgttcactaaccgtgtctttttaatcggtctgatcatcgcgcaattagcattggttattgtgttatcagcgatgattcaaaagctgagcgcaggtgtaacgacgatgctctttatgctttattcggcgctgacgggtcttacgctttccagtatattcattgtctataccgctgcttctatcgccagtactttcgtcgttactgccgggatgttcggcgcaatgagcctgtacggttacaccacgaagcgcgatttaagtggctttggcaatatgctgtttatggcgttaatcggcattgtgctggcatcgctggtcaacttctggttgaaaagcgaagcattgatgtgggcagttacctacatcggcgtgattgtctttgtcggattgacggcgtatgacacgcagaaactgaaaaatatgggtgagcagattgatacccgcgacacgtcgaacctgcgcaaatattccattcttggcgcgttaaccttgtatctggacttcatcaacctgttcctgatgttgttgcggatcttcggcaaccgccgttaattctttttcaccatcactatcccggccatgtgtcgggatttttttcttactaaaaacgacacttaacaagtaccaggtataaaatatgccttatggacgagcggaagcgttttctgtatccataaatgcaaaagtattttgtatgcgtggttttaaatttattgatggtgaatattaatattttttctaaggataactaaaagaatggaatcatactcgcaaaacagcaataaattagattttcagcacgaggccaggatattaaacggtatatggctcattaccgctttaggtttggtggcaaccgcaggactagcctggggagctaagtatatcgaaattacggcaaccaaatatgattcaccaccaatgtatgtcgccatagggttattattactttgtatgtatggcttaagtaaggatatcaacaagataaatgccgccatcgcgggcgtaatatatctgtttttactctctttggtggcgattgtcgttgcaagtttagttcctgtatatgccattatcatcgtgttcagcactgcgggcgcgatgtttttaatcagtatgctggccggtttattatttaatgttgatcctggttctcaccgttttatcattatgatgacgttgacagggttggccctggtaatcatcgtgaatgcggcattaatgagtgaacggcccatttggataataagttgcttaatgattgtgttatggtcaggcattatctcgcatggacgaaataagctccttgaattggcggggaaatgccatagtgaagagttgtggagtccggttcgttgcgcttttacaggtgcattaacactctattactattttatcggcttctttgggatacttgccgcgatagctataacgcttgtctggcaaaggcatacgcgtttttttcattagccgtaaatgcacatactaaagaacttaactaaacttcacatcgccgcttcatttttcgcccgtagcttcttcgcctggctttccagcaacaggtaacagatcagcgccagcagcagtgggataaagtaatacagcacacggtaagcgagtagggcggcgataattgtacctttggaggtatgctccccagccagtagtgcgataaacaccgcttccagcacaccgatccccgccggaatatgcacgatgacgccagcaatactactaaccagtaacacgcccagtacaaagaaatagttcacgctttgaccaagtaacagccagataatcgcccccattaccatccagttaacgctggaaatcagcatctgagcgagggcgaatttccatgaaggcagcaccagcttttgccctttgatggtcatatggcggtgcttcgcgaaagcgcaaaaccacaaataaaccgcgataatcatcagtaagccaatgccgagaatacgcagcgtagtttgatcgacataccagtgatccggcaactccaccacgcctgcggtaaagataatccctgccagtaaaatgtagcccagccagttggtggtaatactgagcgagaaaatccgcgtaatagtgctaccgggcaaccccagacgagagtacaaacgatagcgcataccaatgccgccgacccaggtactgagcgtcaggttgaaggcgtagcagataaacgacaccagcatcacctggcgcttcgccagtttgtgaccgcagtaaaagcgggcgagcaggtcatagcagccgtaaatcagatagctgacgaccaccagcccgaccgcactaagcagcgcaacgcgattgtagtcgcggatgaccttccagacctcttcccagtccacttttttggcgtagaccaccagcaacacaatcaccgcgataaaaaacagccaggtgaggatcttctttgctaagcgccagcgcgggtgtgatttactcatcagggttttacccccgtgttttcagtttctacccgatcctgcgtttccattgtcggttgtgcgggcggatcaacctgcgccagacgtggcgtgtgtgccggaagccagccaaccagcgccgggaagtggcgtaaaaagtggaacgccagcacgcttttggtcaggttccaccaggtgcgtttgggcagcatggtttcatccacctgctgacaatctgcggcaataatgccgttcagattatcgcgcagcgtctggttaaaatgacgatcgtggatgatgacatttgcttcgagattcagtgacaaactgagcggatcgagattactggaccctactgtcgcccagtgatcgtccatcaatgccactttgccgtggagcgggcggcggcggtactcaaaaacctgaacgccgcctttaaccagatagttatacagcaagcgcgcaccgactctgacaatcggcatatccggttcgccctgaatgatcagtttgatccgcaccccgcgccgtgccgctttacgcaaggcgtgtaaaaatcgatagccggggaagaagtaggcgttggcgataatcacttcccgccgcgcctgagtgagcattttcaaataatggcgttcaatatcatcgcgatgttcttcgttatcgcgccagaccagcaatacctgcgcttctcccggctggcggttctcttccgctttgtgatgacgtcgccaccagcgtcgtgccgcgctctgtccaggcaggttttccagctcaaactggagaatatcttcgacaatcggcccttcaaggcgtaccgcgtaatcctgtttagcctctggaccgtagctggacatatgctcggcggagtaattcagcccgccaataaaggctatacgcgcgtcgatcaccacaattttgcgatgcatccggcgaaacacattggtgcgcataccaaaaaggcgagggcggggatcgtagtagcggaacactacgccagctgccgtcagttcattgacaaactcatcgctgagatccggcgaaccgtagccatccagcaagacttccgctttaaccccgcgttgcgctgctgccagtagtgccgcatgcagttgtttgccgacgtcatcctcaaaccagataaacgtttcaagaatgatgcgttcttgtgcctcgccaatcgccttaaacaccgcgggataatattgctcgccgttttccagcaactggatcttattgccttcgcgccagctacatttcataaatgaatctccgcacttaaaggggcatgatcagaaaggtgtcgccatgtccgcagcggcaacgcggttggcgcgctggcgctggcatttttgacgtagatcctgtccagtcgtagtagaggaaattgcaccggaaacgtgcgcgccgggcgtccgtgggcgcgggtaaaaatctcatccagtccggcctgcacttttaacggatgattagctttttgccgccagtcattgaaatcacccgccaccaataccggttcgccgtccggtagctcattcacccattcggcgagcatcgcaagctgcgcctgacggtgcgcctcacgcaggcccagatgtacgcacatcacatgaatcgcttttccggtcatcggcggcacaatgcggcagtagagcacgccgcgcttttccgcaccatcgaccgaaacatcgcgattctcataatgttcaatgggataacgcgacagtacggcgttgccgtgatgcccttccgggtatacggcattgcgaccgtaggcaaaatcgctccacatagtgtcggcgagaaactcgtagtgcgaggtatcgggccagttttccacatgcagcggatgaacttcgtgcgcgcccatcacttcctgcaggcaaacaatatcggcgctgacggtacgcacggcgtcgcgaagttccggcaaaatgaagcgtcggttaaacgcggtaaagcctttgtgaatattgatggtgagcaccttgaacgaaaattgttgtgtttgatcgggcataattttcctgtctttgcctcttatctcattgaaatagtgtagtcggcgtcacaaaaaggtgcggtcttacggaattttccgtaaagttcggtactctgagtaagtagagataaattcttcaggagagaagccatgaagtggcaacaacgtgttcgtgtcgcaacgggtctaagttgctggcagattatgttgcatttactggtagtggcgctgctggtggtgggctggatgagtaagactctggttcacgtcggcgtgggattatgcgcactgtattgtgtcacggtagtgatgatgctggtgtttcagcgccaccccgagcaacgctggcgtgaggtggcagacgtgctggaagagctgaccacgacctggtattttggcgcagcgctgattgtgctgtggctgttgtcccgcgttctggaaaacaactttttgctggcaattgcagggctggcaatccttgccggcccggcggtagtgtctttgctggcgaaagataagaagttacatcaccttacgtctaaacatcgcgtacgccgctgaccctgtcgtggccgttatcaccagtagcggccacaaactattccacacaatatccagactcgcatccttcaaataaatctgcttggtaatgtccgtaaagtggcgaatagggttaatccacgtcaggttttgcagccataccggcatgttttccaccggagaaacgtaaccggaaaggagaatggcgggcatcataaagacaaacacgccgataaacgcctgctgttgtgttgaacagagtgatgaaatcaacagaccgaatcccaccagcgataaaccataaatcaccatcgtaaagtagaacagcgccagcgatccggcgaaggggatttgatacgcccagataccaatcgccagcacaatggtggcctggaaggtggcgacaattaacgccggtacggctttgccgatgaagatctgccaggtggtgagcggcgaaaccagtagctgatcgagcgtaccttgttcacgttcgcgggcgacggaaagtgaagtgacgatcattacgccgatagtggtgatcatggcgatcagtgacggcaccacaaaccatttgtagtcgagattcgggttataccagttgcgtaccaccagctcgctgttgttaggtttcggttttccttccagcagctcctgctgataatttttgacgatctgttgcaggtagttggcggcaatttgcgcactgttggagttacgcccgtcgaggatcaactgcaaaggcgcggtctggaaggtatccagtttgcgcgagaagtcagccgggaaacgcaccagtagtaacgccttttgtgtgtcgatggttgggcggatctctgtgggcttttcagcagcagcacatgagtaaaggcgctggcgcgggcaaaacgttgggtcagctccaccgaatgctcgccgttatcttcatcgtagatggcgatggtggcgttagtcacttccagcgtggcggcgaacgggaacaggatcacctgaattagcacgggtaaaatcagaatcgcgcgggtttgcggttcgcgcagcaacgactgcaactctttgcggattaacgtccataagcgatgaaacatgctcttctccctaatccagccgacgtttggttttcagccacgtcaggccgataaacatcaccgccgaagcgatcaaaaacagcacgtttaccaccagcaccactggaatattcccggcgaggaacaggctttgcagggtgctgacgaaataacgagcgggaataatgtacgtcaccgcgcggatcaccgcgggcatactgtcgatctgaaaaataaagccggaaagcataatcgacggcagaaaagcggcgttcagggcgacctgagcggcattgaactggttgcgggtaatcgtggaaatcagcagccccatccccagggtactgagtaaaaacaggctggagataaaaaacagaatcagcagcgacccgcgatacggcacgccgagaataaacactgacaccagcatacacagcaacatcgccagcatcccgagaaagtaataagggatcagcttacacagcagcagttccgtgcgggtaatctccgtagagagcagagcctccatggtgccgcgttcccattctcgcgccaccaccagcgaggtgagaatcgcgccgatgaccgtcatgataatggtcaccgcaccggggataatgaagtgctggctaatcgccgccgggttaaaccagtagcgggtttgtacatcaataagcggttcaaaagtctgcccgttgtcctccgctcgctgcatttgccagatctgccagatcccttcgacatacccctgtacaaagttagcggtattcggctcactgccgtcggtgatcacctgaatcggtgcggtggcgttggcgcgctccatctgttccgcaaaatccaccggaataaccaccagaccgcgaattttccccgcctgcattttggcgatcagttcctgacggttatcgctgatggtggcgtcgatgtagggcgaaccggtcatggtgtgggtgaaatccagcgccgcttcgctacgctgttccagtaaaatcccgacccgcagcttgctggagtcgaggttaatgccgtaaccaaaaataaacagcagtagcagcgggatcactaccgcaatcagccagctactcggatcgcgaacgatctgccgcgtctctttaacgcacagcgcccgtacgcgacgccaggacaggatcgggttactcattgctatgctccttatcccagtcgtggatcaactgaataaaggcttgctccatggtgggatcgggttgctcatcgttagccgactgtgctttcaaatcgtccggcgtgccgctggcgattaatttcccgcggtacaccaggccgatgcggtcgcaatattccgcttcatccataaagtgggtggtgaccatcaccgtgacgcctttctctaccatgctgttgatgtgcagccaaaattcacggcgggtgagggggtcaacgccggaagtcggttcgtcgagaaacagaatgtccggttcatgcatcagcgaacaggccagcgccagccgctgtttaaaacctaatggcagttcatcggtggcgtgggaggcgatacttttcaggccgaacgcctcgctcatgcgggagattttttcgttctgcgcccgaccgcgtaagccatacacaccagagaaaaagcgtaaattctgttcgaccgtcaggttaccgtagagcgaaaatttttgcgccatatagccgagatgctggcgcgctttaccggaactctctttcagatccatccccagcaccagcgcctggccggaagtcggcaccagcaaaccgcacatcatcttaaaggtggtcgatttacccgcgccgtttggccccagcaaaccaaaaatctccccacgtttaacggcaaagttgacgtgatcggtggcggcaaaatccccaaatttcttggtcagttctttcgcttcgatcaccgtctcgccgggtgtgccttctaccgtatgtaatattgcgcccagcggcgattccgaggttccggcaccgcccagcaaatcaataaacgcatcttcaaaacgcggcgtagtttcgttgatgttgatttccggcatcccgtcggcatggcgaatatcgtctggtgtggcctcttttttgaggatcagacgtaccgatttcccctgaatcatgccgtcgctgacctgcggcagtttcaaggcgcgttgcaacagtttgcggttgccctcgtgtggactggtcatcagaaagctgcgtccggccatggtttgtgtcagggcttttggttctccctgatacagcaactcgccttcgttcatcagtaacacgtcacggcactgctcggcttcgtcgagatacgaggtactccagaggattaacatcccttcgcccgccagctcatgcaccatctgccacagttcgcgccgtgagatagggtcaacgccgacgccgggttcatcgagcagcaacactttcggttcgcccaccagggtacaggccagaccgagtttttgtttcatcccaccggagagcttgcccgccaggcgtccggtaaacggcccaagagacgtaaactccagcaggcgagcaaaagtttgcttacgtgcctcgccggtgacgctgcgcaaatccgcgtacagattgaggttctccatcaccgtgagatcttcatacagaccaaatttctgcggcatataaccgagcacggcgtgcagcgcgccgtcgtttttgatcggatcaaagccaatcaccgtggcactgccgctgtcgggtttcagtaatcccgccaacatccgcatcagcgtggttttacctgcaccgtccggccccaccaaccccgtcacataaccggcgtgaatggtacaatcgagcggcgcgacggcgggcttgtccatgcccggaaagcgtttttccaggccgttcagcgtgataacggcatcattcatgtcctgcctcgtcaccgaattgtaccgtcactggcattccctggcgtaacgcatcatcggcgtcggtcaccacaatacgcaggcgatagacgaggtcggtacgcagatccggcgtttcgacggttttcggggtaaattcagcagtcggcgaaacgaaaccaatctgcccgtgatacggcttgtccgggcgaccatcggtataaagcagcactttgcgccccggctgggcctggtcaagattacgttcatcaacataagcgcgcacccacaccggacgcgttagtgaaacggtaaacaccgtgccaccttcattgaggaccgtgcctggctccaccgcgcgcgttaacagcgtgccatcagacggggctatcaacgttgagtcctgtaaattcaactccgcctgcgccagttgcgcctgcgcctgttcgaggctggctttcgcctgagcgatgtcctgttcacggttaccggaacggtactgacgcaatttatcctgtgctgatttcagcgttgcctgcgcctggtcgcgcgaggagcgggcattttccaggtcatttgccgaaatagtgcggcttttccacaacccttgctggcggttatagaagttctgcgcatagtcataggcggcttgcgcctgtttcaccgctgcggcggcctgagcgatttcttcattgcgatacccggcaagcatcaggtcatactgcgcctgtgccaccgaaacacccgctttcgcctgcatcagggcaatctcatacggcttgtgatccagttcgcccagcacctggcccgctttgatagcatcaccttcgtccaccgccagcgattcaacgcgccccccaacacggaaactaagatttaccgtacgaatatccacgttgccatacagcgtcaggccgttatcctggcggctttgataccaccagtagcctccggcaaccacggcggcaagtaccactaccgccaatccgatcacgacaggttttttcatcactacaaactcctttgcgataatccttgcaaaatcaggtcgatatgacaggtcaccgtctggttgatcagttcggtcttttcttcatcgaacgcggtccagccggtacgtaacagaattgtttctttgccaagacggaacgccagaatctcaccaatcaacgcatgggtatgaaggatcatgcgggtgtcattggcgtcgcagccggtccaggcggcaatcaggcgtgtcaggtggctgtgtagcggactaatcacctgttcgtgcaccaggtggtaggctgccgtgggagagagctgctcacgggagataaacttgctgaggttgacggtgtcatcctgggtgagcagcttaatcatgttcctgcaggcgcgaaggatcagttcacggatggcagcccgatcaggctgtggttgcgcgaacaagcgttcggcttcctcggcatgcggacggaactgctcgccaataaaatcggcaatccactgggcgcaggcgaggtacaaatcttctttcgaaccgaagtagtaggtgatggcagcgatattctgcccggcctgggcggctatctcgcgagtggtggcgttcattccatattcaccaaactgcgccagtgcggcagcaatcagctgttttttcgcctgttcacccttgattgtcatggcaggattattcatcgcacagtccattcttaatcaaatgattgattaagattatgactccataggggagttgtccagtatggctaagaattttagcaacgccagtcacagggataatttatgcgctgcgtcacaaaaactgctacactccgctccctcatgacattgtggtttttgtcattttccttttcagtatctccctgaaaactacaccggtaacggtcggggcggttcggagtagttatgtctttcgattctttgggtttaagccctgatatcctgcgcgccgttgccgagcagggttaccgtgaacccacccctattcagcagcaggcgatccctgcggtgctggaaggccgcgacctgatggctagcgcccagaccggcaccggcaaaacagcgggctttacgctgccgctgttgcaacacctgatcactcgccagccgcacgccaaagggcgtcgtccggtacgtgcgctcattcttaccccgacccgtgaactggcggcgcagattggcgaaaacgtccgtgattacagcaaatacctgaacattcgttcgctggtggtgtttggtggtgtgagtattaacccgcagatgatgaaactgcgtggcggcgttgatgtgctggtggcaaccccgggacgtttgctggacctggaacatcagaatgcagtgaagctggatcaggttgaaatcctcgtcctcgatgaagctgaccgcatgctcgacatgggctttatccacgatatccgtcgcgtgttaacaaaactacctgcgaagcgccagaacctgttattctccgcgaccttctctgacgatattaaagccctggcggaaaaactgttgcacaacccgctggaaatcgaagtggcacgccgcaataccgcgtctgatcaggtgacccagcacgttcactttgtcgataagaaacgcaaacgcgaattgctgtcgcacatgattgggaaagggaactggcagcaggtgctggtgtttacccgtaccaaacacggcgctaaccatctggctgaacagctcaataaagatggcatccgtagtgcggcgatccacggcaataaatcgcaaggtgcgcgtactcgtgcgctggctgattttaaatcgggcgatattcgtgtactggtggcaactgacatcgctgcgcgcggcctggatattgaagagctgccgcacgtcgtcaactatgaactgccaaacgtacctgaagattatgtccaccgtatcgggcgtaccggtcgtgcggctgctaccggtgaagcgttgtcgctggtgtgtgttgatgaacacaaactgctgcgtgatatcgaaaaactgctgaaaaaagagatcccgcgcattgcgattccgggctatgagccggacccgtcaatcaaagccgaaccgatccagaacggtcgccagcaacgtggcggcggcggtcgtgggcaaggtggtggtcgcggtcaacagcaaccacgccgtggggaaggtggcgcaaaatctgcaagcgcgaaacctgcagaaaaaccgtctcgccgcctcggcgatgccaaaccggcaggcgaacaacaacgtcgccgccgtccgcgtaaacctgccgctgcgcagtaatcttttatgccgggctatgcccggcatcaggctgatgaacaaacgcaaaactgcctgatgcgctacgcttatcaggcctacgtgaactctgcaatatattgaatttgcatgcttttgtaggccggataaggcgtttacgccgcatccggcatttcacaacaagcacttgtcagcaatttgagaacacgggaaaaaatttatctgttttaccgcccataagccaccgagacgttacttctctatagccaattgttcgcgcaactccattaaaaggtagcccagtcgattcttgcccttaccatgaccaccgtctccccagtaagcatcgttttccgtatgctcaaccagttttgcgggcgcggttgccagcaagagcgcacgcagttctgcatgctgttcgaatttagcgcgaagtgcttttcgcatcacctgttctttgaccgactcccagtttttacgcagaggcttagaacgatcgcgccccatgcgtgcggcgaccataggggaagaaacccgacggatctcttcgcggtatttttcatcaaggaatttttgtgcctgaaaatagtgttctgaggtaggccaggttttcccgtcaaccttgatgggccaggcggcaaagttagaaaaatcaccgtagtcatcgctggtgctgtagaaatttatgatggtgtcttgcatgacgtgttggatcctttgtgctcgaacgggcattaaaccgcattatgttggtggttattgcgagccgctttccagaaacagaaaaaccattacccctgaaaaccgaaaaatgccacaatattggctgtttatacagtatttcaggttttctcatggcattaaccgccgcgcttaaagcgcaaattgccgcctggtataaggcgcttcaggaacagatccccgactttattccccgtgcgccgcagcggcagatgattgcggacgtcgccaaaacgctggccggagaagaagggcgacatctggcgattgaagcccccaccggcgttgggaaaacgctctcttatttgattcccggcatcgccattgcccgcgaagagcaaaaaacgctggtggtgagtaccgccaacgtggcattgcaggatcagatttacagcaaagatttaccgctgctgaaaaagatcattcccgatcttaaattcactgccgcttttgggcgtgggcgctacgtttgtccgcgtaatctgacggcgctcgccagtactgaacccacgcaacaggatctgctggcgtttcttgacgacgaactgacgccgaacaatcaggaagagcaaaaacgttgtgcgaagctgaagggcgatctcgatacttataaatgggatggtctgcgcgatcatactgatatcgctatagatgacgatctctggcgtcgtttaagtaccgacaaagccagctgcctcaaccgcaattgttactactatcgtgaatgcccgttttttgtcgctcgtcgggagattcaggaagcggaagtggtggtggcaaaccatgcgctggtgatggcggcgatggaaagcgaagcggtattgcctgacccgaaaaatttactgctggtgctggacgaaggccatcacctgccggatgtggcgcgggatgcgcttgagatgagcgccgaaatcaccgcgccgtggtatcggctacagctggacttgttcacgaaactggtcgctacctgcatggagcagtttcgcccgaagaccatcccaccgctggcgatccctgaacgtttgaatgcgcattgtgaagagttgtatgagcttatcgcctcgttaaacaacattctcaatctctacatgcctgccgggcaggaggcagagcaccgttttgcgatgggcgaactgccagatgaagtgctggagatctgccagcggctggcaaaactcaccgagatgctgcgtggcctggcggagttatttcttaacgatttaagtgagaaaaccggcagccatgacattgtacgtctgcatcggttgattttgcagatgaaccgcgcgttggggatgttcgaggcgcaaagcaaactctggcggctggcttcgctggcgcaatcttccggtgcaccggtgaccaaatgggcgacgcgggaagagcgcgaagggcagctacacctctggtttcactgcgtgggaatacgtgtcagcgatcagctggaaaggctgctgtggcgcagtattccgcacattattgtcacctccgcaaccttgcgttcgctgaacagtttttcgcgtttgcaggagatgagtggtctgaaagagaaagcgggcgaccgttttgtggcgctggattccccctttaaccactgcgaacagggcaaaattgttattccccggatgcgcgttgagccttccatcgacaacgaagagcagcatattgccgaaatggcggcctttttccgtaagcaggtggagagcaaaaaacatctcggtatgttggtactgtttgccagcggacgggcgatgcagcgctttctcgactatgtgacggatttacgtctgatgttgctggttcagggcgatcagccgcgttaccgtttagttgaactgcaccgcaaacgcgtcgccaacggtgagcgcagcgtgctggtgggcttacagtcatttgccgaagggcttgatttgaaaggtgatctgctcagccaggtgcatatccacaaaatcgcttttccgcccatcgacagcccggtggtgatcaccgaaggggaatggctgaaaagcctcaaccgctatccgtttgaggtgcaaagcctgccgagcgcctcgtttaacctgattcagcaggttgggcgactgattcgaagccacggttgctggggcgaagtggttatctacgacaaacgcttgctgaccaaaaattatggcaagcgactactggatgcattaccggtatttccgatagagcaaccggaagtccctgaaggtatagttaaaaagaaagaaaaaacgaaatccccacgccgtcggcggcgttaatgatgtgagtcaggtaaggagtcgtaaatggactatcgcaaaatcattaaagagatcgggcgcgggaaaaaccacgcgcgcgatttagaccgggatactgcgcgcggtctgtatgctcatatgctcaatggtgaagtccctgaccttgagttgggcggcgtattgattgcgctgcgtatcaaaggagaaggggaagcagagatgctcggcttttacgaagccatgcaaaatcacaccatcaagctgacgccgccagcaggcaagccgatgccgattgtcatccccagttacaacggcgcgcgtaaacaggccaacctgacgccgttgttggcgattctcctgcacaaactcggttttcctgtggtggttcacggggttagcgaagatccaacccgcgtgctgactgaaaccatttttgaattgatgggtattacgccaacgttgcacggcgggcaggcgcaggcgaagctcgacgaacatcaaccggtgtttatgccagtcggcgcgttttgcccgccgctggaaaaacaactggcgatgcgctggcggatgggcgtgcgtaacagtgcacataccctggcgaaactggcgacgccatttgccgaaggtgaggcgctgcgtctttccagcgtttcgcatccggaatacattggacgcgtcgcgaagttctttagcgatatcggcgggcgggcgctactaatgcatggtactgaaggtgaagtgtatgctaatccgcagcgctgcccgcagatcaatctcattgaccgtgaagggatgcgggtgctgtatgaaaaacaggacactgctggtagcgagttactgccacaagcaaaagatccggaaaccacggcgcagtggattgagcgttgccttgctggcagcgaaccgattcccgaatcgctgaaaatccagatggcttgctgcctggtggctacgggtgaagcggcaactatcagcgacggcctggcgcgcgttaatcaggcattttaattcttttctcagccggatgagccatgtcatccggcttttaccccaccgcaatatgaaattcctgcatctttattgaccttcccacgcccggcgtgcagcataaaaatacaacaaacacataacataaacaggagttaaccatggaaagtggtcatcgctttgatgctcagacgctgcacagttttattcaggctgtatttcgtcagatgggtagcgaggaacaagaagcgaaattagttgccgatcatttaatcgcggcaaacctggcagggcatgattcacatggtattggcatgatcccaagctatgtacgctcctggagtcaggggcacctgcaaattaaccatcatgccaaaaccgttaaagaggcgggggcggcggtcacgctcgatggcgatcgcgcatttggtcaggtcgcggcacatgaagcgatggcgctggggattgagaaagcgcatcagcacggtattgccgccgtggcgctacataactcgcatcatatcggccgtatcggttactgggcggagcagtgtgcagcggcggggtttgtctctatccactttgttagcgtggtcggtattccaatggtcgcgccgttccacggtcgcgacagccgctttggcaccaatccgttctgtgtggttttccctcgtaaagataatttcccgctgttgcttgattacgccaccagcgccattgcatttggcaaaacccgcgtcgcctggcataaaggcgtccccgtgccgccaggttgcctgattgacgttaacggcgtgccgacgaccaatccggcggtaatgcaggagtcgccgttgggttcgctgttgacctttgccgaacataaaggctacgcccttgcagcgatgtgtgaaattcttggcggggcgctttccggcggtaaaacgacgcatcaggaaacgttacaaaccagtcccgatgccattcttaactgcatgaccactatcatcatcaacccggaactcttcggcgcgccggattgtaacgcgcagaccgaagcctttgccgagtgggtgaaagcctcgccgcatgatgatgataagccgattttgctaccgggcgagtgggaagtgaacacgcgtcgcgaacggcagaagcaggggattccactggatgcgggaagctggcaggccatttgtgatgcagcgcggcagattggtatgccggaagagacgttgcaggctttctgtcagcagttagccagctaaaaaaaagcccgtccagtggcggacgggcaaacaagggtaacataggatcaatgagggttagagcatatgcgtctgtcggcaaacagacagggaaatacttgtgctggacgtagcgtaaacgcctgatccgtccaacggttcggattttgtaggcctgataagacgcggtagcgtcgcatcaggcatctgttgccggatgcggcgtaaacgccttatccgtcctacgaattacttataaattaccgcagtaccgcttaatttattgttgttggtggcggaagtgatgctgtatccactggcaccggctgccgcggctttctcagccagtttcgcttccagggcatcgagggtggatgcgccatcggcagaaaccacgccgattttattcatgttctgtgcctgggatgccgttaccggttccgccgcgaacacgccaaatgacagagttgaaagagccatagcagcaacaacagtattgatagttttcataattaatctctcgcaggtgatttttgtataagtgacgttgtttcgtcgatgtgatgagtatcacgtttttttacgagagataaaatcgaagagaattgaccgccttgttcaaataaattgattgatatctaacctactgataaaccatttatttgttgtacttatgaacttgttttataccgcgtggcagtcacagcagcgttaaaggcacggaatgacacgcaaaatacaaattatactcgctatgcatctcgccagttgtagttaacgtaactggctgtctttcgaacctctgcgattatatcctgtataagctggtttttgtaaatctttctcctgctgacaatgaatacataagcgcacgccaggaatggcttcccgacgggcctgcgggatgggggcaccgcactcttcacattcatccaggctttcgccgcgcggaatttcaccccgagcgcgggcaatcgcatcttcaattgtactgttgatctgttcgttgacggcgtcatcgttagcccaaccggatgccatatcgacctccccatatcaatacttgtacagttaagtgtagctaatccagggacgaactcgggcagttcaagcatcagatctccgaccattcccgcagcagattatgataaagattaagcagcgacaggatctcttcactttcgccgtagcggcttttcagcgactgaatattgttgtccagttcaaacagcatggcgcgctttttatcatcgcggatcatcgactggatccacataaatgatgccactcgtacgccgcgggttacgggtgtcacgcaatgcaggctgctggagggatacaacacgagatcgcctgccgggagttttacccgatgttgtccgaaggtgtcattaacgaccagttcgccgccgtcgtagctttgtggatcgcttaaaaacagcgtggcagaaaggtcagtacgcatccagccgttttgtggatggctgcgtactgcgccatccacatggaaaccataggtttcattgttctgatagcgattaaacagcggcgtggaaagggtacgcggcaaggccgcggcaaagaataaagcatgttggttaaccgcgttcagcacctcattttgcagggcggcgtataacgtgctgcgggtgtcgacctgttgattgttcttaacttgcgcaccttgtgcgccggtggtgacgcgtccatccacccattcggcttgttccagttgttcgcgaaaacgagcgacgtcctgtggcgataacacgccgggaatgtggtacatcatacaatttctccaaaaagtggggcctgcgccccacatctgaatcagaaatgcatattggctgtgagcaagaaggttcttggctcgcccgggtgataacggtagccgctcttgttgattgaggcgacgtaatcggtatcaaacaggttgtaaacgtttagctggaagtcgagattgcgattaactcgataccccagtttggcatcggcgacccagtaaccttcggtaaacgctggcgttcccaccgcgccgtctgaacctttatgcatactgccgatatagcgtgcgcccgcgccaacagagatatcgtcggttgcctgatattggctccataaggtgaaggcgtgctccggggtatacggcagcgatgaggaaccatcctgggcaacatctttgccgtttttgatggttgctttttgctgggtatagccgccaatcacctgccacgcgggagtgatattcccggccacggatatctcatagccttcgacgcgtttcttaccgtattgcgagtaagttccgtcatcattttgctcaacttcattttcgatatcagtgcggaacagcgcggcggtgagcaacagacgtttatccagaacctgccatttggtgccaatctcgctggtgttggctttttgcggtttaaaatcggtgcggttggcactgttaccgctgccagactgcgcaagggcgaagttgttgccgcccggaggctgctgggaaacggcatagttaatatagacattgccgttttccgtcaggtgatacagcgccccggctttccagttcatcagattgcccgacttggcggtgtcgacggtggtgaccggagaaccttttgccacaccagttgggcaggtgatggcaccgcgtccgctgccgccgcaggcggtggcactgtcatattcagtatgataattatccagacggatcccgccgttcagctcaaaatcacgggtgatttgcagcgtatcaaaggcgtaaattgcgaaggtatccgtctgaccattggcgtttgcgccgttgcgcgtcaggccgccgggatgaatgctgctgtcaggatgataaatatttaccgcgggtaacgtcaccggattaacgccgtagttagtctgcgtttcacgggtaaattccacgccggtactgacatcatgaccgatagaaccggtatagaacgtcgaggtcaggttggtctggttggtgagaattttattactcacatctttggtattcgccgtgcgtgaccaggtccagctattcacatcgctggtgggctgagtaatattcgacgccccgcccataatcgccgtcatcaggtaatcctgctttacgcgcgaccaacgggtagtattgcgaatggtggtgttatcgttgatgtcgtgctcaaaacgcatggtggcggtgtcggtggtcgaatcgtcgtaatcggaatccgtgccgtaaaagttatgagtatcaacttttccggaatgattcagggccgccgttcccgcagatggggcagaatagcccggcaaaccgatggtcggaatgccgccgtctggcgtgttgtgctgggtgacatgcagataattaagatacaaacgattcgctgtaccaaggccaaaagcgacagaaggggcgacgccgtaacgctcatttttgactttgtcgcgtccggcatcgtgcgttttttcgcccattacattcaggcgcaccgcggtggtatcaccaatgacctgattgacgtccagcgtgccgcggcggaaccaggcgctgccaatactggcggaggcgtcaatgccggaatcattgcgcggctgcttgctgatcatattgatcgagcctgtcggtgcgctgcgcccgtagtcggtgccggacggccctttaatcacttcgacctgctcggtattgaaggtgtcgcgcgagacgctgccgatatcgcgaatgccatcaatataaatactgttagaggtatcggcaccacgcatataaatggcgtcgccagtggtggagttaccgttctcacccgcaaaaaacgcacccacgccggggacgtttttgagcgcgtcggtaaggttggttgcgccctgatctttaatcacttgttcagaaattaccgtcatcgtgcgggtagtatccgctaccggacgcgagaatttcggatcggcagattgttgtggcgcataaagcgaaggcgttgatgcttcgacaaccagcgtgtcatccgcgttagtttgcccttcggcggcgagtgcctgagccacaggcgtgatgccaatacaaagaccggcaaagaacgtgagcgaatgaaattgtctggcagggaaattgcgattgttttccattttgcaggtgactttttcttatatgttgaaattttcactgccacgagaaagcctctctgcggatgcgatgccactgttaatcccgtgatagtgctcgtgaaagtgataataattttgataagcattatcacttggagcgattttctatcacccattgcgcgaaaaagaaatacatttatttacattgagttcatatttgatgttttttgattacaaaacagacgaaaactgcatccagaggcgaatgcagttacgttggtggggttatttgtagatggttgcagtaccgaacatctggtcatttccgcctgcggaattaatgacataacctttcgcgccttgttcgcgcgctttttctgccagtttatcctccagatcgcttaggtttgatgcgccagttgccgaaacggtaccggcgggccgtagctgaccgctgtccaggttactcatcggttgcgcggcataagccgtgagagagattccgctcaggacggtggcaatcagtagtgtgaggcactttttcataatgacatcctcataaatacaacgggtagtgcctgataagtgtaggtcgcctgcgcgatgcaaatgacgcaaaaaattgacagagatgtgcttattttttgaacgatatatttttacaaaataagacaaatcaatgacatgcataatgctgatttttatgatgaattgccataaaccatagccatgttaaggttttggggaatgataaacgcagccagatatttaccctgtcgcgttatgcgggtatcttacgccgctgcttaaaggagaatgctatgtccgcccagaaaccggggttgcatccgcgcaaccgtcatcacagccgctacgatctcgccacgctttgtcaggtcaatcctgaactcaggcaattcctcacgcttacacccgccggggagcaaagcgtagactttgccaatccgctggcggtgaaggcgctcaataaggcgttgctggcccatttttacgccgtagcgaactgggatatccccgacggttttctctgcccaccagtaccgggccgggcggattatattcatcaccttgccgatttactggcagaagcaagcggaacaattccagcgaatgccagcattctggatatcggcgttggtgcgaactgtatttatccgctgattggcgtacatgaatatggctggcgttttaccggtagtgaaaccagcagccaggcgttaagcagtgcgcaggcgattatcagttctaatccggggcttaaccgcgccattcgtctgcgtcggcaaaaagagagtggggcgatttttaacggcatcatccataaaaacgagcaatacgacgcgaccttgtgtaacccgccattccacgattccgccgctgcggcacgggcaggtagtgagcgtaaacgccgtaacctggggctgaacaaagacgatgcactgaactttggcggccagcaacaggagttgtggtgtgaaggcggtgaagtcacctttatcaaaaagatgattgaagagagcaaaggcttcgcgaagcaggtgatgtggtttacatcactggtatctcgtggtgaaaacttaccgccgttgtatcgtgccctgacggacgtgggcgcggtgaaggtggttaaaaaagagatggcccaggggcaaaagcagagtcgctttattgcctggacctttatgaacgacgagcagcgccgccgttttgtcaatcgccagcgttaaagcgttggttcccccggcggtaacggttcagccggggtcgcgcccggagcaggcagcacctgataagtctgcactggcgcgcgaacgcccgccaggtcgaaatgttttttcacctggctgtcgagggcaaagcgtaccgtccactgtttgagtggcagcgtggtgaacgaaacacgcagtgtaaacgcggtattgcttaagccgacaatcccggcaaaattcggttcaccaataatcagcccgcgaatttcttcgttttccattaattccgctaccgcatctttcagtgcctgattggctttatcagcatcttcatggcgatcaacatcataatttgccaccaccgaaccaatgccgcggacaaagttagcaaaggtggttatcgaagaccacggaatgatgtgatacgccccggtatcctgtcgtacgcccacggagcgaatcgacatccgttccactgtgccggtcaacggcccgatagtcaccaaatctccagtgttcatgccgttttcaaactgaataaataccccggtgataatatctttcaccagcgtttgcgaaccaaacgagatagccagacctaatgccccggcacctgccagcaatggcgcgatattgacgccgatttccgacaacacaatcatgatggtgatggtactgataatcaccgccagcgcgttacgaaacagcgtaagcagggtacgcgtgcgggcgctgggtagcgggcggccatgaatatccgaagccagccggttttcgatcaaactggcgagcaccgtccagccaaccgccgagaagaaaagaatgagtgcgatacggatcaggatatctacggttttctgccccgcgccgttttgcagccagttccagaaatcgaacaatccccatgcgctcaacagcaacattaccgccacgcagactgtcagaatacgcgccgttttcagcgccgccgacagccagccattcaaccgtttttgcagctccggatagttacgctgagtatgtggcgagagagtgatggttttcgccagccagcgggaaaacataccggaaacaaacgctgcgataccaataatcgccaggctgcgcaccgttgcacccatcataaatttcaggctgttgcccggatcgaacaacgaaaagaaaaacagcacgataaaataggcgcttgccagccagtgccacaccagcgcaaaggcgcggataaacaggctgaaaaaggccagcgaatgctccgcgaagttgagcaaatgctgggtaatctcttttttattacgaaagatcaggtacaacgcccagacggtcatgcacagcataatgatgacgttcgccagcgcacctatctgtacattcacctgattagagataatcggcacggccacaatcaggccataacctatcaaactgcttaaccagctcaggcgacgactccagtaacgggcgctctcgtcctgaatcgtgaacgggcgcagctccgccacgtttgggcaaaaaatcaggcgtagtacggctttgaaaaattcaatgagggcaaaggcgttgagaaacaaactttgttggaaagcgatggtgcgactgcctgcattcaggttgtcgcttaatacctggccgacaaataatgtcagggccagtaacagcaggtcgataataaacgccccgataatcatcgccggaagctgcaaccagttgctgcgctcacgatttttttgccgcgcccactgacccattttgcgatacagcggcagtgcgcacaggcgaatcagccagtaaaaaccaaacactaataccgctaacattgaaaaatgggtcagcgcattgctgaaggtttgtggattaaacggcttatgcggggagccggtgatattgcgataaagttgcccgaagcgggcggaaagggcttcaccataatggcggctgacttcggtgaccttttgcagcacggtttgctcttcgaccagcgtcggcggcactatttttggtaccggttcagcagggggcgtagcggcaacggtgcgcaactggtcgatcaactctttacgcgaggtgtcattatccagcacatccgccagtgcgccataggccgcttttttttgttcgatatccggttccggggccggttcagtcgttgagtccgttgtcgttgtggttgtaacgccgggtatggataccgcgtgggcaggtgcgcccagcaggcagaagaggatgaacaggatccaccgcatgactcctccagtgagaaaatagagcaaaaagataagtatagatgctggaggaggggcgattttaaatgagaggaatctggtgtgcctccctttcgggtgaaagggaggaagggatattaagcaggttgctgacaacgtgcgggcttttttgccggatgcggcgtgaacgccttatccgtcctacaagttcatgcaattttaataagttgccagatatcctgtaggcctgataagcgtagcgcatcaggcaatgtgtcttattaagagacgtgctgcaaaaattcctgcaagcgctggctcggcgggttcttgatcaacacctgcggattgccatcttccgcaatccggcctttgtcgataaagatcagccgcgaagctactttctcggcaaaaccgatttcgtgggtcacgatcaccatcgtcatcccttcttcagccagatcctgcataaccttcagcacttcatggcgcagttccgggtcaagagcggaagtcggttcatcaaacagcatcattttcggcttcaccgccagcgcgcgggcaatcgccacacgctgctgttgaccaccagaaagttcggaagggtagtgatgtgcacgttctgccagaccgactttcgccagcagctcacgtgccagtttttccgcctcttctttgttcgcgccacgcacgcgtagcgggccaaacatgacgttttccagcgctgtcagatgcgggaagaggtaaaactgctggaacaccatacctgcttcctggcgaatcaggcgctcgtcaactttcggatcgttaaccttcaggccatcgacaatcagatcgccggaggtgatttcttccagtttgttgatgcagcgcagcagggtcgatttaccggaaccggacggcccgataatcaccacgacttcgccctgggcaatgttcaaatcgatattgtgcagcacctgggttgggccaaagtgcttggagacgtttttaaattcaatcacaggattttcatccttctttccagacgacgcagaataaagctcagcaccagggtaataatcagatagaacaccgccacggcgctccagatctcaagggcgcggaagttaccggcaataatttcttgcccctgacgggtcagttccgccacgccgatcacaataaacagcgaggtgtctttaatgctgatgatccactggttacccagcggcggcagcatacgacgcagtgccagcggtaaaatgacgtagcgaatggtttcccaacgtgaaagaccgagcgccagtcctgcttcacgaaaacctttgtggatagacagcaccgcaccacgcgtgatttccgcaatatacgcgccggagttgatcatgatggtgaccaccgccgcagtaaatgggtcgatgcgtaagtcgttaaacgccatcggcagggcgaaataaataaacatcacctggacgacgataggtgtgccgcggatcacttcaataaagaccagcgcgacgtggttggctatccaacctccgaaggtgcgtgcaaaacctgccagcaatccgattaccagaccgcctgccagaccgaggaccgaaatccacagggtcattttggcaccttcaatcagaagcggaatggcaggccagatggcactccagtcaaactgcatatgttgttcctgttaccgtggtgtaaataatcaaattcagggtaattaatggccccggagcgggtttgcgcccctcaccctaatcctctccccataggggagagggaactgccagtgcgttttacaggtgtagcgttattatttcggttcagtaccgaaccattttttgtagatttcgttgtaagttccgttctcgcgcagggttttcaacgcgccgttgactttgtcacgcagctcgtcgctacctttcgggaacgcaataccgtattgctgcgcttccagagagtcacctaccgctttgaactgaccgttaccggcggttttgatgaagtacagaatgtttggcgtatcgtgcagaacggcgtctgcgcggttggtgcccagttccatataggcgttatcgatgttcgggaactgacgcagatctttagttttgatgtttgctttcgcgtaatcaacggagccagtaccgctcttcacagcaaccactttcccgtcgagatctttcacgcttttcacatcgttattgttagctttcaccatcactaacaggccgcttttgtagtagccgtcagagaaatcgatcgcttttttacgctcgtcggtgatggtaatgcccgccagcgccagatcgacgtttttggtttgcagtgccggaatgatcccactgaaatccatcggcttcagttcgtaatccagcttcagctctttagcgatggcagcccacagatcaacgtcaaagcccacatatttatcgccctgtttaaattcaaacggaacgaaggcggtatccgtcgcgacaactaattttttatccgcggcatgagaagaaaccgcaaaagccagggtcagtgcagccagtgaaacttttaatacagacttcatagcatttccttttttctatccacgggacgatcccctgcgtgacattcacatatatgaaaaaatcgtgccagttttgcaactccttgatttttcgagatgcggcaaaaacgtgatgcacgatttatagggcaataccctgaagatgcaccattctggggcaccaatctggtgcgctaaaattgtgcactcaacacagtgattatttagcgtaaaacctgatgaaaaaacaatctttatgtaacgattgtgtgatgatgtggatacaaaaaatttacttaatcagctggagatagcagatggatgcactaaataagtgcgttgaggtgggctgcaaaacaaaacggcctcctgtcaggaagccgcttttatcgggtactaaagttctgcaccatcagcgatggatttattcgatgttagactcgataaaccacaggaatttatccaggtcgcgagacgcggcggtcaggatatctgcggtgtcgtcatctttcgcttcgccaatcgctttgcgtacgtcattagcgacgattgcgtaacggtcagccagttctttcaggtgatcctgaacgttgtggatgtccagcgggtaacttttcagcggggttttgctgttgataacttgagtggtccccagagctacaccgcccagctgcactgcacgttctgccatggtatccagatgatcgatcagtgcggtgcggaagccatccagcatttcatgtacggcaatgaagttagcgccgcgcatgttccagtgcgcttgtttggtaatcaaagaaagatcaataaactggataacctggcgattcagcaactctactgttgcttttttctcgctgtcggagacatcgttgcgggtataaagcagattggtcgcttttgatttaactaatttagcggtactcataatttcatatcctcttgatgttatgtcccagtaattaacgagattaagtatagcaccggctatgtgttccgctattctggctgttcctatcacactaatagtggtaacaagcgtgaaaaacaaaactaataaagattcaatgagttagatatattgataagaacaattcttatttatctgctcgccaggaattttcggaataaatatgcttttgcataattcgatatataaagacggtgtagaggaaaagtagcgagaaattctgcatggttatgcataaccatgcagaaatgtaaatttaattaatgtctaattcttttattttgctctctttgcgtactgtcagcgtagaccccattgaagcggcgatgatagcgccgagcgccagtagctgtatgggtgtcagtgtttctccgaggaaaatcatcccggaaacggcagccagcgccggttccatgctcatcagcgtaccaaatgtccgtgttggcaaacgggtgagggcaatcatttccagcgaataaggcagagcggtcgagagaatagcgacagccagacccaatggaataaccgaccagtgccagagtgcttcaccagcctgaagcgctccaattggcacgaaaattaacgctgcaatcaacgaaccaattgccaccgtcgcagggccatgttccgctcctgcgcgttgcccacttaaaatgtaaatagcccaacaagccccggcccccagtgccagcgcacagccggttaaatcgacatgggaaacgtcttgccccagcggtagcaggaaccacagaccaagaaccgccagcacaacccagacgaaatctaccgggcgacgagaagagaacagcgccaccgccagtggtccggtgaactccagcgccaccgcaatacccagcggtactgtctgaatagaaagataaaaaagataattcatcccacccagcgaaacgccgtaaaacaacagcggtaaccgttgctctttggcaaagcgcagtcgccatggcttaaagaacgcgatgaggatcagcgttcctaatgccagacgcagcgcagtgacacccggtgcgcccaccagaggaaaaagtgacttagctaacgaggctccaccctgaatagacgccatggcaacgagcaatatgactattggtaaccagaccggcattttacgtaatgaaccaggcatcctttctcccacaaatatctagacttaagtaaagcgtggagtgtactggatatacccaatgctggttgagcatttgttgaaaaaattttcccccgttttgactaaaatgcgccaggattgatggaatcattagtctggtgattaggaataatctggatgaatgacagggaaaacatgcgtaatacttacgcagttctctgaaaaagtgatttaaatttagatggatagcggtgtatggaaacgttctgttacatgaaatggcccgttagacatcacaaatcgcgaagagtttcccattaatttttgatatatttaaaacttaggacttatttgaatcacatttgaggtggttatgaaaaaaattgcatgtctttcagcactggccgcagttctggctttcaccgcaggtacttccgtagctgcgacttctactgtaactggcggttacgcacagagcgacgctcagggccaaatgaacaaaatgggcggtttcaacctgaaataccgctatgaagaagacaacagcccgctgggtgtgatcggttctttcacttacaccgagaaaagccgtactgcaagctctggtgactacaacaaaaaccagtactacggcatcactgctggtccggcttaccgcattaacgactgggcaagcatctacggtgtagtgggtgtgggttatggtaaattccagaccactgaatacccgacctacaaacacgacaccagcgactacggtttctcctacggtgcgggtctgcagttcaacccgatggaaaacgttgctctggacttctcttacgagcagagccgtattcgtagcgttgacgtaggcacctggattgccggtgttggttaccgcttctaatcactttggtgatataaaaaatccgcctctcggggcggatttttgtttttaaggtttcgggtcgaaaatatcggttccgagatggttgtaatccaccttctgtaactggaagttggtgatgtatatcggcccggctttcttctcagatataaacgggtatttgatgttaatttccttcgctttaatccccgtccactgggagaaaaagcctaagaagtcattggctgagcggcgggctttaatcacacgatgcgctttatcgtcgctggaaatgaccataaaaggcacctggaaattttgctgatatttatcatcatgggcaaggtattgcacgtctttaccgcgctctttaaaggccagaccgtggtcagaaaagtaaaccagcgagaagctgctgccgctgttgcgtaactgatcgtacagcttgcgcagtaaatcgtccgtttgcgtcatggtatagagatagcacgacgtttctttcgattgcacaaaggtttcgtattttccttgtgtcctgtcgcaggcctgcggatgtgagcccatcagatgtagaacaatcagctgcggttgcgagtgctcttgcgccagcacttgagcggtcatatccagtaacgcttcgtctttggtgtttttatctgcttcaaaattaccttctttcaggaagtacacttcatctgctcgtttggcgatgctggcgatagcggtatcgtattcgccgatttgaccctggttggaaaaccaccaggtctggaagcccgcgcgatttgccagggtgacaaagttatcctgaaactgtggtttgccatcgacaacgcgattgagcgttaagccaagcgatttctgcgtggagccactggcggcaatgtagtcagcaaatatcaaaccgttaacgctgctggcaaacggggtattgtcccagtgaccgccaaaggcaccgagggcatcgcgacgcgcgctttcaccgatcaccaccacataggtctgatacttcggcttaacggcagtgaccgtccaggtatctttcattccggaaagttttgccatccgttcttgctcttcaatcacctcgttattattgacgatgacatccttagcaaaacgaaataccggatagccagtatctttcagtttaaatacgccaccccaggccaggttttgcacgggagcaacaaaaaatgtcgccacactgaataccagacacaggctgtcgaaggtattccagcgcgctttttcattctctttttttcgcctgattgctattacgccgagcgcaaaaataaataagccgaccaggtagctgtaccacggaaaaatcgtcaggatttcggtcgactcttccatattggtggagtgcaatgccagcaatgtattgaaattaggcgcgccgtaggcctgagcaaaagggaaataacaagccgccaccagcgaactgacaccgaccagaactttttgtacgcgaggcaatgttcgccatagcaaaagcaaaatagccgtaaacgcagcggtgtagagcaaactgaaggggtaacctaagccgaggttaattaatagcgactgtaaaaagtagaacgcagtccacgggctaaatacccggctacgggtaacaagcgattctttgagggttaaattcatatgccactatcgtaacaaacgccatgtgcttaccctggcgtcaagggtcaatacctgcaagagtgcgtgaagagtggaaaggggtccgcatccgcgagccgcaatatacgcagggctgcaagaagatagagcgagccgccgttcaggtcaactactgacgaacaaatcttttgcgaaggggattgcaaatccgacaaaaagtggggtttttcagaccaaaacgcgttatgcctgcatgaaagcaggagtgaagcggcgtaccgcgacgccgctatttatcggaaggtttatcttgctgcggtttgttgttgaccatatcgcacaacatagagagcagcattaaccgtactttaaagggagaatgactaaacacgcgcatacacctcttgaactcattcataagacctcctgacttgctaatcccgtcgatccttgagggatgattgcattacatacagatatagcacaggctatattatatagctattgctaaaacgttaattttttgtaccttcgcaactctggtttacaatgtgcgcacgaaatgagaacgctatgtatgcgtcaccataatgaggaagcacaatgagtcgtcgcgcaggtacgccaacagcaaaaaaagtgacgcagttagtgaacgtggaagagcacgttgaagggttccgccaggtcagagaggcgcatcggcgcgagcttattgatgattacgttgagctgatttctgacttgatcagggaagtgggggaagctcgtcaggtggacatggctgctcgtctgggagtttcgcaaccgacggtggctaaaatgcttaagcggctggcaaccatggggctgattgaaatgatcccctggcgtggcgtgtttttaacggcagaaggagagaagctggcgcaggaaagccgcgagcgacatcagatagtcgaaaatttcttgttggtgttgggcgtcagtccggaaatcgcccgtcgcgacgcggaaggcatggagcaccatgttagtgaagagacgctcgacgcttttcgtttgtttacccagaaacacggtgccaaatgagcctgccttttttacgcacgctgcaaggcgatcgtttttttcagttattaattcttgttggtatcggattaagctttttcgtgccctttgcaccgaaatcctggcctgctgctatcgactggcacaccatcatcaccttaagcggcctgatgctgctgaccaaaggtgtggagttaagcggttattttgatgtgctggggcgcaaaatggtgcgccgctttgctacggagcgtcggctggcgatgtttatggtgctggcggcggcgctgctttctacctttctgaccaacgatgtcgcgctgtttattgttgttccgctgactatcacgctaaaaagactgtgtgagatcccggttaatcggctgattatttttgaggcgctggcagtcaacgctggttcgctactgacgccaattggcaacccgcaaaatattcttatctggggacgttctggtctttcgtttgccggatttattgcccaaatggcaccgctggctggcgcaatgatgctgacgctcctgctcctgtgctggtgttgtttccctggaaaggcgatgcaataccatacgggggtgcaaacaccggagtggaaaccgcggctggtgtggagttgtctggggctgtatatcgtctttctgacggcgctggagttcaaacaagagctgtggggactggtgattgtggcggcaggctttgcgctgctggcacgtcgcgtggtgctcagtgtggactggacgctgctgctggtgtttatggcgatgtttatcgacgtccatttactgacccagcttccagcgttgcaaggcgtgttgggtaacgtgagtcatctatctgaacccgggttatggttaacggcaatcggtttatcgcaggtgatcagtaacgtgccgagtaccatattgttgctgaactatgtgccgccgtctttattactggtatgggcggtaaacgtaggtggctttgggttattacccggatcgctggcaaatttgattgcgctacgtatggcgaacgatcgccgcatctggtggcgtttccatctctattcaataccgatgctgttgtgggcggcgttggtgggatatgttttgttagttatactcccggccaactagggtctggcaaataaaaaaggcggattatgagtccgccttttgctttaagttttgaagattaattcagacgaaccggcatcccggagcggtttttaatcgcttcatcaagaacaacctggtcaacatctggctgaccggtcactgtctgcacgctcttcgtcagggtaattggcacaatttcctgaccttcaaactgggcttcggtggtagacagcgggttatggacttcaatataacggctgccgtctggctcggtggtcgcttttaccggctcatcaataaactgtacgcgggtaccgaccggtactttctcgaacaggaatttgatgtcttcgttacgcagacgcacacaaccatgacttacacgcaggccgataccgaagttggcgttggtgccatggatagcatacaggcgaccgatatagagtgcatacagccccatcgggttatccggacctgccggaacgacagccggaagcggttcgcccgcagcgcggtactctgcgtgcattttggcggtcggcgtccaggtcgggcctgcttttttacgctcaactttggtggtccagttgataggcgtatctttgcctaactgaccaatgccgatcggcagcacgataacggtgttggtccctttcggatagtaataaagacgcatctcagcactgttaatgacgatgccttcatgaacggtatccggcaggatcagctgctgcggaatgttcagtacagtaccgcctttcggcaggaaggtatccacacccgggttcgcttccatcatattggaaagccccatctggtactcggcggcaaaatactccagcggctgagtgttaccttcaggaatggtgatcacctgattctgaccaaccaggcgactcccgtcggttggcagaggataagttaccgcagaggcggtactgcaaaagccgacaacagcgaaggccgctgcgaataatgttttcaatttcatattcatgttaagcgagattttgtgcctggcaggccattgggttgagaatattagagtattggaagcgcattataagttcattccagctcacagtgaaatcagatgtgtacgaaatcacattttttgcctttggcttgagtgtagaccttaagcgaggagcaggatcttctttcagacttatggcataatgcgcggtttgtcatatctcttttcaggatacgcctgtgttagtttccagtaacgtcaccatgcagttcggcagtaagccgttgtttgaaaacatttccgtcaaatttggcggcggcaaccgttacggcctgattggcgcgaacggtagtggtaaatccacctttatgaagatcctcggcggcgaccttgagccgacgctgggtaacgtttccctcgatcccaacgagcgcattggtaaactgcgtcaggatcagtttgcctttgaagagttcactgtgctggatacggtgatcatggggcataaagagttgtgggaagtgaagcaggagcgcgaccgcatctatgctttgccggaaatgagtgaagaagacggctataaagtggccgatctggaagttaaatacggcgaaatggacggttactctgcggaagctcgcgccggtgaactgttgcttggcgtgggaattccagtggaacagcactacggcccgatgagtgaagttgctcctggctggaagctgcgtgtgcttctggcgcaggcgctgtttgctgatccggatattctcctgctcgacgaaccgaccaacaacctcgacatcgacaccattcgctggctggaacaggtgctgaacgagcgtgacagcaccatgatcatcatctcgcacgaccgtcacttccttaacatggtctgtacccacatggcggatctggattacggcgagctgcgcgtttatccgggtaactacgatgagtacatgacggcggcgacccaggcgcgtgaacgtctgctggccgataacgccaagaagaaagcgcagattgctgagttgcaatctttcgttagccgctttagcgccaacgcctcgaaatctcgccaggcaacttcgcgcgcgcgccagattgataaaatcaaactggaagaggtgaaagcctccagccgtcagaacccgttcatccgttttgaacaggataagaaactgttccgtaacgcgctggaagtggaaggtctgaccaaagggtttgataacggtccgctgtttaaaaatctcaacctgctgctggaagtgggtgaaaaactggcggtactgggtaccaacggcgtcggtaaatcaacgctgctgaaaacgctggtgggcgatctgcaaccggacagcggcaccgtaaaatggtctgagaacgcgcgcattggttactatgctcaggaccacgaatatgagtttgaaaatgatctgaccgtgttcgaatggatgagccagtggaagcaggaaggcgatgacgagcaggcggtacgcagtattctcggtcgtttgctgttcagccaggacgacatcaaaaagccagctaaagtgctttccggtggggaaaaagggcggatgctgtttggtaagttaatgatgcagaagccgaacattctgatcatggacgaaccgaccaaccacctggatatggaatccattgagtcgctgaacatggcactggaactgtatcagggcacgctgatctttgtttcacacgaccgtgagttcgtaagctccctggcgacccgcattctggaaatcaccccggaacgcgtgatcgactttagcggtaattacgaagattacctgcgtagtaaagggatcgagtaagtgattatccgtcaccccgatactgtcggggtgacggcggctgatgacaaatgcaaaatagcctgatgcgctacgcttatcaggcctacgcagtacctgcaatatattgaatctgcaggactttgtaggccggataaggcgttaacgccgcatcaggcattaacaaagcgcatttgtcagcaatctgagtaacgtcgaatcgattttcttaatcccacatcaattcacttccattaattctcaaacatccatgcccaacgctcgcttaccgtgaatgttgaggtcggcaagcgtaaagcgtccttcccagtttgtttcatagtcctcgcgcgggaagtcgcccggcgatgcgcctttttccagtgcggccttcaccttgtgcgcgtaggcaagatttttctcgcacatcggtgccgcaggaatgtacatcacgttgccccaaccttgttgattttcaacgggggcaacggaatggatgacgtcgcagtgccaccagacggagtctccggcttcgagttttggaatgctggttaacgcctcaatcaacagtggatgccattgctctgataccggcaatactcttccgggcgctacgccgcacagttcatcctccggcacatcatcaagcagcggacgtaacagtacgtacgccatagcttcaggaatgggcacgacgtgcagcagcccctgaccaggcagcatatcagagagcgctgtccagccctggaatgtccgaaacacggaacatttggtggtgttgtccaccgtgtactcttcaacttccgtacgatgtgccgcatgccagggatcatattgcgccagattgccattaaagacgttggcgaaaacgcgctgatacgctggaagcagccagcgttccagtgccccggagtcggtatgcgctccaagacctttggaggtcgttccgggcggacggcggcggatacggtcagggtagatgacgctcacatccgggttaaaccattgctttccatcactttcaaatgtccacagacgattgagaaacgactgcgcattcgccatttcttcactctggcgggcctgcatttgcgcctgcgaccagtagatggggtaaatctcgggacgtgaagcgctgagcgtcccgaagaaattatcgccggggcctttgtagacctcgtcaaagcggttgcggtccagatagtccagcatcgactgatcccagcctagcgcttgttcgcgggggaaatggccttttatcaccgcacaaccgcgacgtttaatctgttcgcgctgctctgcagtaacatgacctgctttgatatcggcataagacagcaccggccagacggcatcgccctgtgctttgagtgcgttgatttcagccactcgcgtggcaatgtcatcgcttagctgattaaagatctgctggacgtcgccaagctgcgcccgcagcgcgtgcttcatctgacggatagctgctttgtgatcggcaggcaatgtgtcgctggtaaaagtagaagccataaccacctctcattaactttcattcgaaaccattctgatttgcatgtgacaatataagttataaataagttaatgcaagtttaatgatttgatgtgatgtacaggatgtaaaaagaagggaaaaccggagcgcacggctccggtagagaggtcagctgttaaaaggggatgtgttatccagcaccgcctgaatcacattcagcgcgccttcatgattattatcatcggtagcgtaacgggcgatttgtttaatgttttccgcagcattgcccatcgcaaaggaataacgcgccattttcagcatctccgcatcgttaccgctgtcgccaatcgctaccacattttgcggtgacagatcccagcgtttcagtaaccgcgaaataccgtttgctttatgtagaccgggaataatcaggtcgataaagccaaaaccactggtaacgggtttcataatgccatcgagcgctacgtgcagtttgtcgatcactaacgggatttgttcatccggcaggttgagcgaaaacttgaacagtacgtcgtcaatctcctgataatcttttacaggtttcaggcgatggtagtgttttgccatcagtgcgacaaatgcttcgggggcattttcgctgacatatgcactttgcagaccgcaggcgacaaaattgagttgcttatcttttagcaactcgccaataacaatccgcgattcatgtcgggtcagttcgccgtggaacaactgcttgccatgttcgtaaaccagtgcgccgttttccgcgacaaaagagatctcatcctttagctcaggaaagaatgaaataagctggtaatactgattaccgctggcaacaacgaacttaatgccgcgctttttcagttcctgatattgcgccataaaacgtggttggttgtacgttttggcgtcgttaagaaaagtaccgtccatgtctgtgacgataacttttacgctcataggtgtgctcctggctcgaaaatgaaaccgtaacagtgtaataacaatgtgacgcagagcacaaattatatttcgaatgaaagtaaggatgaaattgatgatgtgaatgatttagcccggcgacgacgccgccgggccgaggagattacagcatatgttcagtacgggcgatgatatcgtcctgagcgtctggagagagcgcggtgaagaacgcggaatagcccgcgacacgcactaccagatcgcgatactgatcgggatgttttttcgcatccagcagcgtttcgcgggaaacgatgttgtactgaatatgccagcctttatgcacttcaaagaaggtacgcagcaggatcatcagtttctgcttgtcagattcgttctccagcgttgccggattcagtttctggttgagcaacacgccgccgagaatcgctgccgtaggcagtttacccactgagccaatgaccgcagtagggccaagatggtcagtaccggaggccgggcttgcgccttctgccagcggggtgtgggctttacgcccgtccggtgttgccatagtctgcgcgccaaacggtacgttagcggagattgatgacgtacccgcgtaatagttgccgccaaccggaccacgaccgtagcgcggattatggtactgtttcagttcgtcgatataggtctgataagcgcgagccagcagcgtatcgacagtatcatcgtcgttgccgtacttcggcgcaccgttaatcagccgctgacgcagctgctcgtgagtcaggccgtcgaagtcatctgccagtgcggcagcaagctgttgctgaccaatcgcaccttgttcaaacaccagtttcttcactgccgccaggctgttgccgaggttggcaatgccgacctgcaggccagaaacccagtcatatttcgcgccgccttgcttgatacttttcgctcgctcaatacagtcatccaccagcgccgagcagagaatatcgtgcacgttctcttccagcatggtgtcgacgacatattcgatttcgattgatttgcgggtgtagtaacggatttgcgtatcccacgcgtccatcacttcatcgaagttgttgaagttacctgccgacaacgctttttcttgtggcaggaacactttgccgctggtggcatcatgcccgccttccagcgccgccagcatcacgcgggcgaagttgataaagctcatgccggtacagcgatagccccatttgccaccgacggcggtttctatacaaccaatcgctgcgtagtcataagcgtcctgcggttcaataccgagtttaataaattccgggatcacgatttcgtcgttgttgaacgccggcatcccgaagccgcaacggatcacctgtacgcaggcgtcgaggaaatcgttgctcattcctgcatggtaacgcacgctgaggttaggctgagtggaacgcaggcgaccgcaggattcgaggatcgcgtaagagagtggattcaccgcgtccattggttgaccatcaaccagattttgcccgccaatagtgacgttctgatacagcggacttcccgcagaggcttttgagtgtgagccggagcggatcttgttcacttccagcagtttcagccagcagctatgcagcatctcgatggcgtgttcgcgatccagcgtctggttgagttcaacgtcgcggcgatagtacgggtagagatactggtccatacgaccaaacgatactgagtgaccgttagattcgatctgcaaaatcaactggatgaagtaacacagttgcagcgcctgccagaaagtctgcggcggctggtgggcgataagatcgcagttttctgccatcgccagcagttcatcgcgacggctttcgcgggtttcggtcgcggccatttcacgcgccagggcagcgaaacgttcaatgtgttcactgactgccaccagcacgatatcaatcgctttcaggaattgctcaccgtgtaaatcttccagcaccgtcaggttgatgcgcgagcgacgttccgctacttcctcgcgcagaccatcaagccctttttccagcagcagcgggaaattcaccgccaggtgcgcatcgccggaggtcatattgccttccgctttaatgattccggtcgccagcagacctttttgctcatcggtaaacatgccgtagcagcgatcctgtacggtctgaccgcgccaccacgggcacacttcatgcagaacgcgtttgttctcttcgctcaccgcaaagccagcaccgggacgatctgccagatcatcaatctctttttcgatccacgagacagtatattccgggaagatcggcgcggcgcgaacttcgcttgcctggttgccaatgatcaactcatcgtgtttgatccagatggtgcgattcgccaggtgatgcgccagtgccagcgcgcgacgtaccgggatcggcttatcgagatgttgttgatacatctcggtatagtgctgcgcgcgctcggtacagactggcggtttcacaatatgcaccagcgcatttttgtgcgctttaatgcggtcgctgagcgtgtccagtttcagtgtggtcatggttgttatcctcgtaaggtcgcggttaaccctttctggcaggcatactgctgggcaaagtcgagcagttctggcgcatcaagcggtttttccggggcgtcatagggcagattaagtaagtgatatttgttgatgcccagcgtgtggtagggcagaaaatgaatttcgccaacgtgcagctcgtcggcggcaaaatcggtaatggcttttacagaggtttcgtcggcattaaagccctgaatcagcggcacgcggataatgatttttttgcccgctgcggcgagttttttcaggttatccagcactctggcggcgttaccgtcggtccactgtttaaacggcgcgtcggcaacgtgttttaaatcggcaagaaacagatcgatatagggcagagaaggggcgatatatttccacggcacatgcagacaggtttctaccgcagtatgaatgcctgcctcgtggctggcttgcagtagcgccatcgccatttccggctgcataaagggctcaccacccgaaagcgttaaaccgccgccgctgcgatcgtaaaacggtttatcgcgcagaacggtcgtcatgatctcctcaacgcttttcacttcaccacacacggttaatgcctgtgtcggacagcagtcggttaacgccgtcagatgctccggggttaacttttcccgatgaataagcaaaccattcagcgcgcgctcaatcacttccggcgcggccttagcgcacagctcgcagccttccagacacagtcgtgcgtcatacagcagatcctgcgtgcgggcgcggctttccgggttctgacaccagcggcagcccagcgaacagcctttaagaaatacgaccgtgcggataccggggccatcatgggtcgagtagcgctgaatattgaaaatcatagttgcctctctatttcgttcaagcattaaaatactttcgaatgaaagttagattgatgtgcgtcaactgttcagagagttttcccgtgatagtctacattcagacaaaaagtacattttgaggatggttatggaactgtatctggatacttcagacgttgttgcggtgaaggcgctgtcacgtatttttccgctggcgggtgtgaccactaacccaagcattatcgccgcgggtaaaaaaccgctggatgttgtgcttccgcaacttcatgaagcgatgggcggtcaggggcgtctgtttgcccaggtaatggctaccactgccgaagggatggttaatgacgcgcttaagctgcgttctattattgcggatatcgtggtgaaagttccggtgaccgccgaggggctggcagctattaagatgttaaaagcggaagggattccgacgctgggaaccgcggtatatggcgcagcacaagggctgctgtcggcgctggcaggtgcggaatatgttgcgccttacgttaatcgtattgatgctcagggcggtagcggcattcagactgtgaccgacttacaccagttattgaaaatgcatgcgccgcaggcgaaagtgctggcagcgagtttcaaaaccccgcgtcaggcgctggactgcttactggcaggatgtgaatcaattactctgccactggatgtggcacaacagatgattagctatccggcggttgatgccgctgtggcgaagtttgagcaggactggcagggagcgtttggcagaacgtcgatttaaccggacgttctgcatcctcataaattgctgatgacgtggcggagtgccgcgtcttatcaggcctggaggtggcaattactgcccacacacctcacaccccggattacgcatcagtttcatttcgcgaaactgacaggtcatcgcatcgtacatgacgattttcccgctggccggtttgccataacctgccagcattttgatcgcttccattgcctgcaacgaaccaattacgccgatcaacggtgccattacgcctgcttccacgcaggttaatgcattttcaccaaacaaacggctaaggcagcgatagcacggttcaccgtcctgataagtaaagacggtgatttgaccttccatacgaattgccgcgccggaaaccagcggtaccttcgcggcaaaacagcctgcgttcagttgattacgtaccgcaacgttatccgtacagtcgagcaccagatcgtgttcagcaatcaatgctgcaagttctgcgtcatccagcagtgcattgactggcgtaatcgcgatatgtgggttgatccgcgtcagggcgtcacgggcggattccaccttcggttgcccgaccgtggcatcactgtgcagtgtctggcgttgcagattcgagagcgaaaccgtgtcgaagtcgagcagcgtcaggttaccgacaccggcgcttgccagatactgcgaggctgcacagccgaggccgcccaggcccactatcagcacgcgagaatctttcagcgcctcctggccgtcaaaatcaaagccgcgcagaatgatttgccggttgtagcgcagcatctcctgatcgctgagttccgccattacaggcctccgaacaacgcgttaaacggttctacttccacccattcgcccacttccacattgccgcgatcgcgttccagcacgataaagcagttgccgaggctaaaggagctaaatatatgtgaaccctgatgtccggtggtcgtcacttccagttcgccatcggcgttgcgttgcagcacgccgcgctggaaatcaagacgtcctggcgtttttttcaggcgggacgctgtgcgtacgcgctggcgcgcgggcaggccgctggcggtgttaccgcttagttttgccagcaaaggctgtaccagttgatagaaggtcagcgtcgctgaaaccgggttgcccggcaggccgcagaaccagctattgctgagtttaccgaacgcgaacggtttacctggtttaatcgccagcttccagaaggcgatctcccccagctcttcaagaatcgttttggtgtaatccgcctcacccactgaaacaccgccggaactgatcaccacatccgcctggctgtcggcttcaataaatgcggcgcgcagggcatggggatcgtcgcggataatccctaagttaattacctcgcatcccaactgttctaacatcaggtgtacggcgagacggttggtatcgtagatttggccgtcgcccagcggctgaccgggcaactggagttcatcaccggtagaaaaaagcgctacacgcactttacgaatcaccggaacttcggcaatccccagtgaagcaattactggcagctctgcggtagtcaggcgagttcccgccgggaaaacaaccgcacctgcagagatatcttcaccgcgacggcgaatattttgcccgctacgcacttcagcagtaaaacgcacgccattgtccatttgttcagtctgctcctgcatcaccaccgcttcgcagccttccggcaccggcgcaccggtcataatacgaatgcaggtacccgcaggccattcaccatggtatggctgaccggcaaaggatttaccggcaacgggcagcggttgcccggaggcaatatcggctaaacgcaccgcgtagccgtccattgcggagttatcaaaccccggaacatcaagcggcgaaacgacatcgctcgccagaatacgaccaaaacactgtaccagtggcagcgtttcctgggcggtcagtggggtgacgcgagaaagcatctcattaagcgcggtgtcgagcgacatcaatccggtggtaaattccatgaaaacactcctgcggaggcaaaatcgaatttgcctattatgtcagaaaaacgccacagactgtatgccacctcgggcgtagcgctgggtcctgcctttacatgccatatccatctttctatattcaaaaattgaatgagtaattcataaaaattctgatatttatagcaaaagtggcgaaccacccttaatggacgaatactatgggcaaagcagtcattgcaattcatggtggcgcaggtgcaattagccgcgcgcagatgagtctgcaacaggaattacgctacatcgaggcgttgtctgccattgttgaaaccgggcagaaaatgctggaagcgggcgaaagtgcgctggatgtggtgacggaagcggtgcgtctgctggaagagtgtccactgtttaacgccggaattggcgctgtctttacgcgtgatgaaacccatgaactggacgcctgtgtgatggatggtaacaccctgaaagccggtgcggtggcgggcgttagtcatctgcgtaatccggttcttgccgcccggctggtgatggagcaaagcccgcatgtgatgatgattggcgaaggggcagaaaattttgcgtttgctcgtggcatggagcgcgtctcgccggagattttctccacgtctttgcgttatgaacaactactggcagcgcgcaaggaaggggcaaccgtcctcgaccatagcggtgcgccactggatgaaaaacagaaaatgggcaccgtgggggccgtggcgttggatttagacggcaatttggcggcagccacgtccacaggcggaatgaccaataaattacccggacgagttggcgatagtcccttagtgggtgccggatgctacgccaataacgccagtgtggcggtttcttgtaccggcacgggcgaagtcttcatccgcgcgctggcggcatatgacatcgccgcgttaatggattacggcggattaagtctcgcggaagcctgcgagcgggtagtaatggaaaaactccctgcgcttggcggtagcggtggcttaatcgctatcgaccatgaagggaatgtcgcgctaccgtttaacaccgaaggaatgtatcgcgcctggggctacgcaggcgatacgccaaccaccggtatctaccgtgaaaaaggggacaccgttgccacacagtgatgaacttgatgccggtaatgtgctggcggttgaaaatctgaatattgcctttatgcaggaccagcagaaaatagctgcggtccgcaatctctcttttagtctgcaacgcggtgagacgctggcaattgttggcgaatccggctccggtaagtcagtgactgcgttggcattgatgcgcctgttggaacaggcgggcggtttagtacagtgcgataaaatgctgttgcagcggcgcagtcgcgaagtgattgaacttagcgagcagaacgctgcacaaatgcgccatgttcgcggtgcggatatggcgatgatatttcaggagccgatgacatcgctgaacccggtatttactgtgggtgaacagattgccgaatcaattcgtctgcatcagaacgccagtcgtgaagaagcgatggtcgaggcgaagcggatgctggatcaggtacgcattcctgaggcacaaaccattctttcacgttatccgcatcaactctctggcgggatgcgccagcgagtgatgattgcgatggcgctgtcatgccgcccggcggtgctgattgccgatgagccaaccaccgcgctggatgtcactattcaggcgcagatcctgcaattaatcaaagtattgcaaaaagagatgtcgatgggcgttatctttatcactcacgatatgggcgtggtggcagagattgccgatcgggtactggtgatgtatcagggcgaggcggtggaaacgggtaccgtcgaacagatttttcatgcaccgcaacatccttacacccgtgcgctgttagctgctgttccgcaacttggtgcgatgaaagggttagattatccccgacgtttcccgttgatatcgcttgaacatccagcgaaacaggccccccccatcgagcagaaaacggtggtggatggcgaacctgttttacgagtgcgtaatcttgtcacccgtttccctttgcgcagcggtttgttgaatcgcgtaacgcgggaagtgcatgccgttgagaaagtcagttttgatctctggcctggcgaaacgctatcgctggtgggcgagtctggcagcggtaaatccactaccgggcgggcgttgctgcgcctggtcgaatcgcagggcggcgaaattatctttaacggtcagcgaatcgataccttgtcacccggcaaacttcaggcattacgccgggatattcagtttatttttcaggacccttacgcttcgctggacccacgtcagaccatcggtgattcgattatcgaaccgctgcgtgtacacggtttattgccaggtaaagacgcggctgcacgcgttgcgtggttgctggagcgcgtgggcctgttacctgaacatgcctggcgttacccgcatgagttttccggcggtcagcgccagcgcatctgcattgctcgcgcgttggcattgaatccaaaagtgatcattgccgacgaagccgtttcggcgctggatgtttctattcgcgggcagattatcaacttgttgctcgatctccagcgtgatttcggcattgcgtatctgtttatctcccacgatatggcggtggtagagcggattagtcatcgtgtggcggtgatgtatctcgggcaaattgttgaaattggtccacggcgcgcggtcttcgaaaacccgcagcatccttatacgcgtaaattactggcggcagttccggtcgctgaaccgtcccgacaacgaccgcagcgtgtactgctgtcggacgatcttcccagcaatattcatctgcgtggcgaagaggtggcagccgtctcgttgcaatgcgtcgggccggggcattacgtcgcacaaccacaatcagaatacgcattcatgcgtagataacattcaggcggagaataaaatggcaagagctgtacaccgtagtgggttagtggcgctgggcattgcgacagcgttgatggcatcttgtgcattcgctgccaaagatgtggtggtggcggtaggatcgaatttcaccacgctcgatccgtatgacgcaaatgacacgttatctcaggccgtagcgaaatcgttttaccaggggctgttcggtctggataaagagatgaaactgaaaaacgtgctggcggagagttataccgtttccgatgacggcattacttacaccgtgaaattgcgggaaggcattaaattccaggatggcaccgatttcaacgccgcggcggtgaaagcgaatctggaccgggccagcgatccggcgaatcatcttaaacgctataacctgtataagaatattgctaaaacggaagcgatcgatccgacaacggtaaagattaccctcaaacagccgttctcagcgtttattaatattcttgcccatccggcgaccgcgatgatttcaccggcagcgctggaaaaatatggcaaggagattggtttttatccggtgggaaccggaccgtatgaactggatacctggaatcagaccgattttgtgaaggtgaaaaaattcgcgggttactggcagccaggattgcccaaactggacagcataacctggcgtccggtggcggataacaacacccgcgcggcaatgctgcaaaccggtgaagcgcagtttgctttccccattccttacgagcaggccacactgctggagaaaaacaaaaatatcgagttgatggccagtccgtcaattatgcagcgttatatcagtatgaacgtgacgcaaaagccgttcgataacccgaaggtccgtgaggcgctgaattacgccattaaccgtccggcgctggtgaaagttgcctttgcgggctatgcaacgccagctactggtgtggtaccgccaagtatcgcctacgcgcaaagttataaaccgtggccttacgatccagtgaaagcgcgcgaattactgaaagaggcgggatatcccaacggtttcagtaccacgctgtggtcgtcacataaccacagcaccgcgcagaaagtgctgcaatttacccagcagcagttagcgcaggtcgggattaaagcccaggtgactgcgatggatgccggacagcgggcggcagaagttgaaggtaaagggcaaaaagagagcggcgtgcggatgttctacactggctggtcggcttcaaccggcgaagcggactgggcactatcgccgctgtttgcctcgcagaactggccaccgacgctgtttaataccgcgttttacagcaataaacaggtggatgacttcctggctcaggcactgaaaactaatgatccggcggaaaagacccgcttatataaggcggcgcaggatatcatctggcaagaatcgccgtggatcccgctggtggtagaaaaactggtgtcggcacacagtaaaaacctgaccggtttttggatcatgccagacaccggcttcagctttgaagacgcggatttgcaataagcaacgcagggagtggaatgcttaattacgttatcaaacgcttactggggttgattccgacgctgtttatcgtctcggtgctggtgtttttatttgtccatatgctgcccggcgatccggcgcgattgattgccgggcccgaagctgatgcgcaggttatagaactggtgcgtcagcagctggggttggatcagccgctgtatcaccagttctggcactatatcagcaatgctgtgcagggggattttggcctgtcgatggtgtcgcgtcgtccggttgccgatgagattgccagccgctttatgccaacgctgtggctgaccataaccagtatggtctgggcggttatatttggtatggcggcgggaattatcgccgccgtctggcgtaaccgttggccggatcgattgagtatgaccattgcggtgtcggggatctcgtttccggcatttgctctggggatgcttttaattcaggtattctccgttgaactgggctggctgcctaccgtgggagcagacagttggcagcactacattttaccctccctgacgctcggcgcggcagtggccgccgtgatggcgcgctttacccgcgcgtcgtttgtcgatgttttaagcgaagattatatgcgtaccgcgagggcgaaaggggtgagcgaaacctgggttgtcctcaaacacgggctacgtaacgcgatgatcccggtagtgaccatgatgggcttacagtttggctttttgctcggtggttccatcgttgtggagaaagttttcaactggccgggacttggacgcttactcgttgactccgtagaaatgcgtgattacccggtgattcaggcggaaattctgcttttctcgctggaatttattcttatcaacttagtggtggatgtgctttacgccgccattaacccggctatcaggtacaagtaaggatgcgactatttaactggcgacgtcaggcggtgttaaacgccatgccactggtcaaacctgaccaggtacgtacaccgtggcatgaattctggcgacgatttcgccgtcagcatatggcgatgaccgccgcattattcgttattttattgattgtggtggccatttttgcacgctggatcgctccctatgacgccgaaaattattttgattatgacaatctgaataacggaccttctttgcagcactggtttggcgtcgattcactggggcgtgacattttcagccgtgtcctggttggtgcgcaaatctcgctggcggcgggcgtgtttgccgtgtttatcggtgcggcgatcgggacgttgctgggcttgctcgctggatattatgaaggctggtgggatcggctgatcatgcgcatttgcgatgtgctgtttgccttcccgggtattttactggcgatcgctgttgttgcggtgttgggaagcggcattgctaacgtgattattgcagtcgccattttttccatccccgcgtttgcccgcctggtgcgcggcaacacgctggtgttgaaacagcaaacctttattgagtcagcacgcagtattggtgccagcgatatgaccgttttgttgcgtcatatcctgcctgggaccgtctcttctatcgtggtgtttttcaccatgcgcattggtacctcgattatctctgccgccagcctctcatttctcggcctcggtgcgcagccgccgacaccagagtggggagcaatgctcaatgaggctcgagcggatatggttatcgcgccgcatgtcgctgtttttccggccctggctatttttctgaccgtactggcgttcaatttgttgggcgatggtttacgcgatgcgctggatccgaaaattaaaggatagttacgtttgaatattgcttgaaagggtaatcacctcacaggaaattattgccctaagcaagtgttgtaactttctgctgattttgtagaatcgggtaatttggttaaaaagccgcagcaagggacaatttttgcagcggcacagcgttcagatagttattttgttaaatgtattaacatgctgagtttatacgaaaagataaagataaggctgataattttatttttattggcagcactgtcatttattggtctttttttcatcattaactatcaactggtatcggagcgcgcggtaaaacgtgccgatagccgctttgaacttattcagaaaaacgttggctatttctttaaagatattgaacgttcggccctgacattaaaggactcactgtatttattaaaaaatacagaggagattcaacgcgccgtgattcttaaaatggaaatgatgccatttttagactcggtgggactggtacttgatgataataaatattatcttttttcgcggagggcgaatgataaaatcgttgtttatcatcaggaacaagtaaatggaccgcttgtcgacgagtcagggcgggttatttttgccgattttaacccatcgaaacgaccgtggtcggtggcttcagatgactctaacaacagctggaatccggcatacaattgctttgatcgtccgggtaaaaaatgtatctcttttacgctacacatcaacggcaaagatcacgatttgttagcggtggataaaattcatgtcgatttaaactggcgatatctgaacgagtatcttgatcaaatcagcgctaatgatgaagttctatttttgaaacaaggccatgagatcattgccaagaatcaactcgctcgtgaaaaactgattatttataatagcgaaggtaattataatattattgattctgtcgatactgaatatatcgaaaaaacatcagcggtgccaaacaacgcattattcgaaatctatttttattatcctggcggtaatttattgaacgcatcagataaacttttttatctgccgtttgcgttcattattatcgtattgctggtggtttatttaatgaccactcgtgtgttccgtcggcaattttctgaaatgacagagctggttaatacgctggcgtttttgcctgactcaacggatcaaatcgaggctctgaaaattcgtgaaggcgatgcgaaagagattatcagcatcaaaaattcgatcgcggaaatgaaagatgccgaaattgaacggtcaaataaattgctctcactgatctcttacgatcaggaaagtggttttattaaaaatatggcgattattgagtctaacaataatcagtatctggctgtggggatcatcaaactgtgtggtctggaagccgtggaagcggtgtttggtgttgatgagcgcaataaaatcgtcaggaaattgtgtcagcgaattgccgagaaatatgcgcaatgctgcgatatcgtgacattcaatgccgatctctatttacttctgtgtcgggaaaatgtacagacatttacccgtaaaatagcgatggtaaacgattttgacagcagctttggctaccgcaatctgcgcatccataagtctgccatttgtgaacctttgcagggggaaaacgcctggagttacgcagaaaaactgaaactggcgatttccagtatccgtgaccatatgttctcagagtttattttctgtgatgacgcgaaactcaacgaaatagaagagaatatctggattgcgcgtaatattcgccatgcaatggaaattggcgaactattcctcgtctatcaaccgatcgttgatattaacacccgcgccattctgggcgcggaggcgttgtgccgttgggtgtctgcggagcgggggatcatttcaccgctgaagttcattaccattgctgaagatatcgggtttatcaatgagctgggttatcagattattaaaacggcaatgggtgaattcagacattttagtcagcgtgcgtcgctgaaggatgatttcttactgcatattaatgtttcgccctggcagttaaacgaaccacactttcatgagcgttttaccaccatcatgaaagaaaatggcctgaaggcgaacagcctctgtgttgagatcactgaaaccgtgatcgagcgaattaatgaacatttttatctcaatattgaacaactgcgtaaacaaggggtacggatatcgattgatgactttggcaccggtttgtcaaacctgaaacgtttttatgaaattaatccagacagcataaaggtggactcgcaattcaccggcgatattttcggtactgcgggaaaaattgtgcgcattattttcgacctggcacgctataaccggatcccggtgattgcggaaggcgtagagagcgaagacgttgcgcgcgaattaatcaaattaggatgtgttcaggctcaggggtatctgtaccagaaacccatgccattctccgcctgggataaaagtggaaaattagtaaaagagtagtttacgtatgtccagaatcaataagttcgtacttacagtcagtctgctgatttttatcatgatttcagcagttgcctgcgggatctacactcaaatggtaaaggaacgggtgtatagcctgaaacagtccgttattgatactgcttttgcggtggcaaatattgctgaatatcggcgtagcgtggcaattgatcttatcaacacgctaaatcccacggaggaacagctgttggttggtttgcgcacagcttacgccgactcggtttccccctcttatttgtacgatgtcggtccttatctgatttccagtgacgaatgtattcaggtaaaggagttcgagaaaaattattgtgcagatattatgcaggttgtgaagtatcgacatgtcaaaaatacagggtttatctcttttgacggtaaaaccttcgtctattacctctatccggtaactcacaatcgtagtctgatatttttgcttggtctggagcgtttttctttactgtcaaaatcgctggcgatggacagcgagaacctgatgttctctctatttaagaacggtaaaccggtgaccggtgatgaatataatgctaaaaacgccatcttcaccgtttcggaagcgatggagcacttcgcctatttgccgaccggattgtatgtatttgcgtataaaaaagatgtttatttgcgggtttgtacattgattattttctttgccgcattggtggcagtgatatcgggtgccagttgcctctatctggtacgcagagtgattaatcgtggtattgtggagaaagaagccatcattaataaccattttgaacgcgtactggatggcgggcttttcttttcggctgccgatgtcaaaaaactctacagtatgtataactcggcgttcctggacgacctgaccaaagcaatgggcagaaaatcctttgacgaagatttaaaagcgctgccggaaaaaggcggttatttgtgcctgtttgacgtcgataaattcaaaaacattaacgacaccttcggtcatttgctgggcgatgaagtgttgatgaaagtggtgaaaatccttaaatcacagatcccggtagataaaggtaaagtctaccgcttcggcggtgacgaatttgcggtgatttatacgggtggaacgctggaagagttgctatcgattctaaaagaaatcgttcatttccaggtgggaagcattaatttaagtaccagtatcggtgtagcacattcaaatgaatgtcctaccgtcgaacgcttgaaaatgctggcggatgagcggctgtataagagtaagaaaaacggcagggcacagattagctggcagtaatcattattcgcaggccggacaaatgattttgcccggcctgaattaattaaacccggctaccccacaaatcgtactcatcggcgtgctcgactttcacacgcaggatatcacccggcttaacgttggtttcaccattgagataaaccgcgccgtcgatttccggtgcatctgccatgctgcgaccaatcgcgccttcttcgtccacttcgtcgataatcaccagaatttcacggcccactttctcttgcaggcgctcggcggaaatctgctgctgcagctgcatgaaacggttccagcgttcttctttaacttcttccggaacctggtcaggcagggcattggcgtctgcaccttcaaccgggctgtatttaaagcagccaacgcgatccagacgcgcttctttcaggaagtcgagtagcatctggaaatcttcttctgtctcgccagggaagccgacaataaaggttgagcgtagggtcagttccgggcagatttcgcgccactgtttgatgcgcgccagttggcgatctacagaacccggacgcttcatcagtttgagaatgcgcgggctggcgtgctgcaacggaatgtccagatacggcaggattttgccttctgccatcagtgggatgacgtcgtccacatgcggataagggtaaacgtagtgcagacgtgtccagatccccagtttcgataactgttcgcacaggctgaccatgctggtttttaccggctcgccgttgtggaagccagtacgatgtttaacatcaacgccataggcggaagtatcctgcgagatcaccagaatctctttaacgcccgcatctaccagacgtttcgcttcacttaacacttcgccaatcggacggctcaccaggtcgccgcgcatagacggaataatgcagaaggtgcagcggtgattacagccttcagaaattttcagataggcataatgacgcggcgtcagtttcacaccttgttctggcaccaggctcaggaatgggttgtgtttcggttttggcacgtagtgatgaacgtgctccagaacctgctcatagctatgaggcccggtgatttccagcactttcgggtggacttcgcggatctgatcttcttttgcccccagacaaccggtcacaataaccttgccgttttcattcaacgcttcaccaatggcttccagtgattcttgtaccgcgctgtcaataaagccgcaggtgttgacgatcaccatgtccgcatcgtcatagctcggtaccacgtcataaccttcagtgcggagttcggtgagaatacgctctgaatcaacaaggtttttcggacagccaagggaaacaaagccgattttcggctggggagttactttgctcatagcttaaaaaatattcagttacaggaaaggtcagggcagggattctacagagttctggataaaatttgtatcgcaatctcattcgctggcggaggcgaaggaaatgtaaattttgttaattcggcgtgaagaattgatcctggacagcattttgctcaaaaaatagccatactatttaattgcaacaaggctgggaagaggaggatcgaagtatgttcgttgacagacagcgaatcgatctgctgaaccggttgatcgacgcacgcgttgacctcgccgcatacgtgcaactgaggaaggcaaaaggatacatgtccgtcagcgaaagcaatcatctacgagataacttttttaaactgaatcgcgaactgcacgataaatcgctgcggttgaatcttcatctggatcaggaagagtggagtgctcttcatcatgctgaagaagcattagcgacagccgcagtatgtttgatgagtgggcaccatgattgcccgactgttattaccgtcaacgccgataagcttgaaaattgtctgatgagcttaacgctgagtatccagagcctgcagaagcacgccatgcttgagaaggcctgaaaactaagggggagaaagcgtctcccccttcatgtttaagtttttgtaaaaatgaatttgttatctcctccactgactacgctttaagccagagtcaatccggaggcgttatgcatcgacaatcctttttccttgtgccccttatttgtctttcttccgctctctgggcggctcctgcaacggtaaatgtcgaagtactgcaagacaaactcgaccatccctgggcactggcctttttacccgataatcacggtatgttaatcactctgcgcggcggcgagttgcgtcactggcaagcaggaaaaggattatctgcgccgctttccggagttccggacgtttgggcgcacgggcagggcggcctgctggacgtggttttagcgcctgattttgctcagtctcgccgcatctggttaagttattccgaagttggcgatgatggcaaagccggaactgctgtgggttatggccgcttaagtgatgatctctcaaaagtgaccgacttccgcaccgtctttcgccagatgccaaaactgtctaccggcaaccattttggcgggcggctggtattcgacggtaaaggttatctttttattgctctgggcgaaaacaatcagcgcccgacggcgcaggatctggataaattacagggcaaactggtgcgtctgaccgaccagggcgaaatcccggatgataatccttttataaaggaatccggtgcgcgcgccgagatctggtcttatggcattcgtaatccgcaaggaatggcgatgaatccgtggagtaatgcactgtggctgaatgaacatggcccgcgcggtggtgatgaaattaatatcccgcaaaaaggcaaaaactacggctggccgctggcaacctggggaatcaactattcaggctttaagataccggaagcgaaaggggagatcgtcgccgggaccgagcaacctgttttttactggaaagattcgcccgctgtgagcggcatggccttctataacagcgataaattcccccagtggcagcaaaaattatttattggcgcgctgaaagataaagatgtcattgtgatgagcgtcaacggcgacaaagtgacagaagatggccgtattttaacggacagagggcagcgaattcgtgatgttcgcactggacccgacggttatttatacgttctcaccgacgagtccagtggggaattacttaaagttagcccacgcaattagctaacgggaatcatcaccactttgcgcactgcggggcgttcagtgagttgctgataccagcgttgcagatttggacgcggtgtccaggtcaggccaacgttaaacaaattgtagatgaacggtgcgatagcgatatcgcccacaccaaactcgtcgccagagaaccattttacttttgccagttccgcatcgagcagggcaaacagggcgtcgcactctttgcaactggcatcaatggcggcctgatcgcgctcttccggtggtgttctgactaatcccatcaggatcccgcgatgagcattactgagcgtctggtttgcccagtccatccatttttccgcttccgcacgacgtgccggtgagtcgatccacaggcgtttttgcccgtactgtgccgccagatagcggacaatggcgtttgattcccaaagaatgagatcactttcgtcgtcacgcaacaacggcaccagcccgttagggttcatcgccagaaaatcagcatcgtgatttatcccaaactcacggcccgcgagaatttgctcataaggtagttccagttcttcgagcgtcagcaatactttttttacgttagttgaattattccgaccccacagcgtaatcatactcaccccttttccgacaggcagccacaggctgaacaggactccgatggtgaagtaaagttaacttttaagcaacagctggcaaaaaaatgacaccagaagcagcgaagcggcaggatattgcataaactttaaaaactttaccaacttacggtttctttaagtttgtgtgtgcgttattaatcaccaaacttatcatacggcgatataacgtattttttttgaatggatactcgggtggcatttatgacgcaatactcctctctccttcgtggtcttgcagcgggttctgcatttttattcctttttgccccaacggcattcgcggcggaacaaaccgttgaagcgccgagcgtggatgcgcgtgcatggattttaatggattacgccagcggtaaagtgctggcagaaggcaatgcggatgagaaactggatcccgcgagcctgactaaaatcatgaccagctatgtggttgggcaggcgcttaaggccgataagattaaactcaccgatatggtgacggtcggtaaagatgcctgggcgacgggaaatccggcactgcgtggttcatcggtaatgttcctcaaaccgggcgatcaggtttcggtggcagacttgaacaaaggtgtgattatccagtccggtaatgacgcctgtattgcgctggctgattacgttgccgggagccaggagtcatttattggtctgatgaatggttatgccaaaaaactgggtctgaccaacactaccttccagacggtgcacggcctggatgcgccggggcagttcagcaccgcgcgcgatatggcattgctgggtaaagcattgatccacgatgtgccggaagagtacgccattcataaagagaaagagttcaccttcaacaaaattcgtcagcctaaccgtaaccgtctgctgtggagcagcaatctgaatgttgatggcatgaagacaggaaccacggcaggcgcgggatataatctggttgcttcggctacccagggcgatatgcgtttaatctccgtagtgttgggggcgaaaaccgaccgtatccgttttaatgagtctgagaaattattgacctggggtttccgcttctttgaaaccgtgacgccaattaaacctgatgccacctttgtgactcagcgcgtctggtttggtgataagagcgaagtgaatctcggggcaggtgaagcgggctcagtgaccataccgcgtgggcagctgaaaaacctgaaagcgagttatacgttaacggaaccgcagcttaccgcaccgctgaaaaaaggtcaggttgtcgggaccattgatttccagcttaacggtaaatccattgagcagcgtccgctgatcgtgatggaaaatgtggaagagggcggattctttggtcgggtgtgggatttcgtgatgatgaaattccatcagtggttcggcagctggttctcttaatcttctgataaccggatggcgcgaaacgtcatccggttatacgtcattaatacatcaacttaatgcgctgcgtctgcgcgtacttcacatactcatcttccgggcaacaatcgctcaccacaatatcaaagcgtttcaggtcacccatgcgcgccggacgcaccttgccaaatttactgtggtcgacaaccagcacatgcttttgcgccatcgacatggcccagtgttttaccggcaactcttcaagattaaaacaggtagcgcctttactgacatgcacgcccgccgcagaataaaaagcgatatccgggcaaaaattattcagcgtttgctgaaaatcgatgggtttgaaaatggcgttgctggcgtgaaattcaccaccgcaaagaaacgcgcggcaatggggtttctctttcagcgccagaaaggtatttagcgaataacaaacggcggtaaaagggatttcattatcaatcgcttcaataatccacggcgtggtggtgccacagtcaaaaaagagggtctgatcgggttctaccagcgtcgcagccagttttgccgcccggcgtttttcttccaccaggcgggatttttgatcgcttaacaggtaatggctggcactgcgcggttccagaacaatatagccgccgagcaaaacgacgggcgcactgtggttgttcagatcgcgacgaatcgtcatctccgaaaccccaagcagggcggcggcgtctttaagatgtaacttatcgctgcgttttaattcttgcagcagctgcccgatacgctcttcgcgacgtgtttccataatccctctgaatagttattgaagcgagccgctcaatactacactttttagcagagatcagtcacgcacccagcctttgcggatcggtaatgcaaaacagacgcgataccacgattgcagacgttgatagagtttatgccccatcgcttgccagataatctgggcactaaggcagccaatcatacctgccagcaatccaccgagcatatccagcggccagtggacgccaagataaacgcgcgaccaggcaatgacgacggccagcaccattaaaagtgagccggaccacaggcgatgccagcataaaaatgccagtgcaaaggtgaaaatcaccgtaccgtgatcgcttgggaatgagtcatccgccgcatgatgcaggaagttatagccgatattttcgacaaagggtcggtcgtgcggaaaaagatgtcccatcgtccaggacacaaacaggctgaccgccagcgcgatagcgatttttatcaccagttgccgttgtgctgtaagcccccacaaccaaagtaccacggccagcaacggcaccacggtaatcaaatctttagcaataaaaatcgccaacgagatcatccacggagccgagtctggcgtcgcgttaataagagagaatagagagagattcaaattttccagcataacttcccgacgcaaagtgattaaaagggagccaatacaggcaagtcgttgagaataaagtgcaggttaaactgggtaaagcggcatcgtcttatttccctcaagcggcctgtttacggtgggtgattgtaacgggcataggttaaataaaacttaaagaaagcgtagctatactcgtaataatgtaagaatgtgcttaaccgtggtttcagctacaaaattcgctttctcgttagctgcgcttttattaaactctgcgcgattattattggcgaagaaattgcatgcaaaataaattagcttccggtgccaggcttggacgtcaggcgttacttttccctctctgtctggtgctttacgaattttcaacctatatcggcaacgatatgattcaacccggtatgttggccgtggtggaacaatatcaggcgggcattgattgggttcctacttcgatgaccgcgtatctggcgggcgggatgtttttacaatggctgctggggccgctgtcggatcgtattggtcgccgtccggtgatgctggcgggagtggtgtggtttatcgtcacctgtctggcaatattgctggcgcaaaacattgaacaattcaccctgttgcgcttcttgcagggcataagcctctgtttcattggcgctgtgggatacgccgcaattcaggaatccttcgaagaggcggtttgtatcaagatcaccgcgctgatggcgaacgtggcgctgattgctccgctacttggtccgctggtgggcgcggcgtggatccatgtgctgccctgggaggggatgtttgttttgtttgccgcattggcagcgatctcctttttcggtctgcaacgagccatgcctgaaaccgccacgcgtataggcgagaaactgtcactgaaagaactcggtcgtgactataagctggtgctgaagaacggccgctttgtggcgggggcgctggcgctgggattcgttagtctgccgttgctggcgtggatcgcccagtcgccgattatcatcattaccggcgagcagttgagcagctatgaatatggcttgctgcaagtgcctattttcggggcgttaattgcgggtaacttgctgttagcgcgtctgacctcgcgccgcaccgtacgttcgctgattattatgggcggctggccgattatgattggtctattggtcgctgctgcggcaacggttatctcatcgcacgcgtatttatggatgactgccgggttaagtatttatgctttcggtattggtctggcgaatgcgggactggtgcgattaaccctgtttgccagcgatatgagtaaaggtacggtttctgccgcgatgggaatgctgcaaatgctgatctttaccgttggtattgaaatcagcaaacatgcctggctgaacgggggcaacggactgtttaatctcttcaaccttgtcaacggaattttgtggctgtcgctgatggttatctttttaaaagataaacagatgggaaattctcacgaagggtaaaaaaatgcctgactgctttgtgcgatcaggcattctcgaattaatggtgatggtcgtcaatctggtgttcgataaccatcccttcacctacgctggcaagatggcgaacataaggatgcgggcggtaagccggagctggcgcaggagccacatagacggtttgcggcacagtcgcgacgctgaccgcttgtggaacgctgactgaatcaggaaccacaaccactttgtatccactcggcacatcgacggtgacactttgcgccatcgccacaccagtaaagcccattaaaagcgcgcccaacagtagacaatttttcataatcatttcgcctgaaataatgcagcgggttaatttccgcgaattatgcagccttcattcaggcattgtgttgccgggcgtgctgccggttttattggtcaaatggcgcttcgtgtttaagaactttatcgatcacatccagtacgccttcacggttattggagcctgcgcggtattttgccgctgcgacgaccgcgctaccggcattttccattgcaaaactaaagcctgcctgacgcagcatctcaatatcgttaccgccatcgccaaagaccaccacttcgctgtcgtctattccccataatttctgcagttggcgaaggccattggctttatgtacgccggggataatcagatcgatgctgccgttgccggtgtggaccgacaccataatatcgccgatggcctcatgtaatgctttttgtacttgtggaatcagttcatcggaaagattcaggccaaacttaaagaagatatcctctaagttgtcaaagttatcgacgtattccagacggtgataatacatttccgccaccgttttcatggcatcgtcatattttttgagtgtataggcactattttttccgcaggcaataatttccacttccgggcgcgtcagcaaatgttccacgacagtagcaaacgcatccttcgatagctcgccattaaaaacatctttgccttcgctcactacccagccgccgttttcagccacaaaggcaatttcattagcaatttcagggaagaaagagatcaactgataatattgattcccgctggcgactacaaagcgaattccttgtgctttcatttgctgatactgagccataaaccgctcacggttataggttttttgatcgcttaagaaagtaccatccatgtctaccgcaattaatttaatgctcatcaactattctccatcgccgtctgcgttttggtatcgggtttggcgacggctttcgcgacaatagccgcgagaataaccagcgccagtacaaccagcattgcactacgtaatccataatgttcgccgagatagcccagcagcggcggcccgacgaggaaagccagataaccggtcgttgctaccacactgacgcgggttggtgcatcggggccggtatcgctggcggcagaaatggtcagcgggaagcccagcgaggcacccagtccccagagtacaacagacaccccagcgacccaggcgctatcgacaaaaataatcagcccaatacccaacgcccccattagtgcactggcccgaaccacggcaacgcgactgtaacggtcgatgaaccaaccgccggtgaagcgtccaacggtcatccccagggtaaaaccggcataaatcagcgagccggaagtagggctaaaaccgtgaccgtcaaccattaataagggtaaccagtcgttggcagaaccttcggcaaaggccatcgccagcaccacaacacctatcagcagcaactggatatcgcgataaaaaggtacgcctttttcgccatgctgggtgccatcggcagcatttttgcccgtaccgtcagggattgcctgaatggcgatataaataggtgcgatacctaccagcgccgccaataaaatgtgcaccgttgccggaacgccaaaggccgtcagtgccatcccgacacctgcgcctgccagcgtgcccaggctataaaaaccgtgcatcatcggcaaaaccgtcttattcatttctcgctcaacggcagcaccttcaacgtttatcgccacttccgcagaaccaaaacttgccccaaagacgccgagaccaacggcaaagagcaggggcgatgtcagccagagtgccagacttaatatcatcatcccgatcaatgcgcaggacatcgtgaccaggatgacattacgtgtcccaaagcgtttcactaaccacgccgagcagagaataccgctcatcgaaccgatcgacagaccaaagagaacaccgcccatttcagcgatcgagacagagagaatatcgcggatagcaggcgtacgggttgcccaggacgccattaacaggcctggcaaaaagaagaacataaacagcgcccaggttcggcgtttcaatgcattacgtgaagaatttacggtcatagatcacgtcaaaataagaagagggaagacaacattagcaaggttgtgtacatttgtacacaattgcagagagaggaaatgacatgcgtcgcgctaacgatccgcaacggcgagaaaaaattatccaggccacgctggaggcggtgaaactttacggaatacatgctgttacgcaccgcaaaattgctacccttgccggggtaccgttgggatcgatgacctactatttttcaggaattgatgagttgttactggaggcgttcagcagttttactgagatcatgtcccggcaatatcaggcattttttagcgatgttagtgatgctccgggcgcatgccaggctatcaccgatatgatctacagctcacaggttgcaacgccggataacatggagctgatgtaccagctctacgcgctggctagccgaaaaccgctattaaaaacggtaatgcaaaactggatgcagcgcagtcagcaaacgctcgaacaatggtttgaacccggaaccgcccgcgcgcttgatgcgtttattgaggggatgacgctgcattttgtcaccgaccgtaagccgctatcgcgcgaggagattttgaggatggttgagagggttgcagggtagtagataagttttagataacaaaaaacccatcaaccttgaaccgaaatggcggggttgatgggctccacaaaatggggacatcaaagaaaagcagtggcactaattaagactgatgccctgcggaaaagttctgcggttgtgcaaaaaaatttcattttcagggcaacttcagttttatcctaatcctggccataccatgacgatgattgtccctgccagcgtcagcaggacgttggcgattgcataggtgcccgcatagcccagcgccgggatgttactgcgagctgtatcactgatgatctccattgccggcgcgcaggtacgtgcgcccatcattgcgccgaacaacagcgcgcggttcattcgcaatacataagcaccgaacaagaaacagataaccacgggcaccagactgacaatcaatccggcaatcaacatctgaccgccaatcgcgcccaggccgttattaataccgctaccggcgctcagaccaacgcctgccataaacaccatcaagccgaactctttcaccatgcttaatgcaccctgcggaatgtaaccgaaggtcgggtggttagcacgcataaagcccagcataattccggcgaataacaacccggcagcgttccccatgccgaaactgaatgtgctgaactggaaggtgatcatcccgatcatcagcccaataacaaagaaggcgcagaatgccagcaggtcagtgacctggctgtgaatcgagataaagccgatgcgatcggcgatggtttttacgcggcgggcatcgccgctgacttgtaaaacgtcacctttgttaagcacgacgttgtcatctatcggcatctcaatctggctacgaatgacgcggttaaggaagcaaccgtgatcggtcaacttcagttgtgcgagacgtttacctacagcgttatggtttttaacgaccacttcttcagtgacgatacgcatgtcgagaaggtcacgatcgaaaacttctttaccgttacggaagctgggatcgagtcgggcatgggcgtcgggatagcctaccaacgctatttcatcgcccatttgtagcacggcatcaccgtctggatttgccagaatcccgttacgtcgaatacgttcaatgtagcagccggtttgtcgataaatacccagttcacgcagatttttgccgtcggtccaggccaccagttccgggccgacgcgataggcgcggatcaccggtaaataaaccttacggttggcatcagtgtccaggccacgttcgcgggcgatttgctgggcgctggtctgtaagtcctgatgctgcaatttcggcaagtaacgcgcaccaacaatcaaactcaccagaccgattaaataggttaaggcatacccgaggctcagattatccagtgccagtgagagctgcctgctttccatgccggaatgacgcagtgtatcgccagcaccgaccagaaccggtgtcgacgtcatagagcctgctaacataccggccgtcaggccaatatcccagccaaacagcttacctaaccctaaggcgatcaccagcgcactgccaaccatcaccagtgctaacattaggtaatttttcccatcgcgaaaaaaaatggaaaaaaagttcggtccggcttcgaccccgacgcagaaaataaacagcataaagccaagattaagcgcatcggtgttaatgctgaaatgttgttggcctaataacagcgatacgactaaaacgccaatggaattacccagttggatcgaaccaagtcgtaactttccgagacatagcccaagcgcgaggaccacaaataataacagaatgtaattcccatttaacaattcggcgacgtttatattcacggaggctaacttcttgtttactagtaagctgttgaaagaaatggtaatttacgataatgttttttaccagaattcagggcgcagattcattcagcgcacctaaacgatagtaaagtaacaatatattttactagtgtaatcacattaggtatcaacggctatatgaattgcgttggcctatattagcatggaatgcgaagcggctttatcttactgaacgccacactggcgaaaaatgtgttcgatagacgcagtgtcaggaggaacgagtgaaacataaacaacgttgggcgggggcaatctgctgttttgtcctcttcattgtggtgtgcctttttctggcgacgcacatgaaaggcgcttttcgggctgccgggcatcctgaaatcggcttgctatttttcattcttcctggagcagtcgccagcttcttttcacagcgtagagaagtcctgaaacctctgtttggcgcaatgctggcggcaccctgttcgatgctcattatgcggctgtttttttcaccgacgcgctcattctggcaagagctggcatggttactaagcgcggtgttctggtgtgcgctgggggcactgtgtttcttatttatcagtagtttgtttaaaccacagcacagaaaaaatcagtaaagccctcaacgcgagggcttgtcagacgatcaggcgtccagattttctttcacccatgcagcaaaatcggtatagccgccgatatgttgctgatcgacaaaaatctgcggcacggtttctacgggtttacctgccttttgttgtagatcttctttagtgatcccttccgcacgaatatctacatactgatactgaaaatcatcgcgttcattgctcaatttctcagccagatcttttgcacgcacacagtaagggcaacccgaacgaccaaaaataacggtttgcattatttctctcctcatagatttatgcctgtaatgatcacgctaaaatgtattcgctgaaagtaggtttaacctgttgcattaattgctaaaagctataactgttaaacacaatacagtgaaaagttttagactgaaggctcactttgcagagggaagcgtatgcgcgcgatcggtaaattgcctaaaggcgtgttgatactggaatttatcggaatgatgctactggcggtggcgctgctgtcggtaagcgactccctgtcgctgcctgagccattttctcggccagaagtgcagattctgatgatttttctcggtgttttgctcatgcttcccgctgcggtggtggttattcttcaggtggcaaaacgtcttgccccacagctgatgaaccgtccaccgcaatattcacgttcagaaagagaaaaagataatgacgccaaccattgaacttatttgtggccatcgctccattcgccatttcactgatgaacccatttccgaagcgcagcgtgaggcgattattaacagcgcccgtgcgacgtccagttccagttttttgcagtgcagtagcattattcgcattaccgacaaagcgttacgtgaagaactggtgacgctgaccggcgggcaaaaacacgtagcgcaagcggcggagttctgggtgttctgtgccgactttaaccgccatttacagatctgtccggatgctcagctcggcctggcggaacaactgttgctcggtgtcgttgatacggcaatgatggcgcagaatgcattaatcgcagcggaatcgctgggattgggcggggtatatatcggcggcctgcgcaataatattgaagcggtgacgaaactgcttaaattaccgcagcatgttctgccgctgtttgggctgtgccttggctggcctgcggataatccggatcttaagccgcgtttaccggcctccattttggtgcatgaaaacagctatcaaccgctggataaaggcgcactggcgcagtatgacgagcaactggcggaatattacctcacccgtggcagcaataatcgccgggatacctggagcgatcatatccgccgaacaatcattaaagaaagccgcccatttattctggattatttgcacaaacagggttgggcgacgcgctaaaaccgccacgtcgatgtatgatacgcgggcttttgaccaggtctgacagagaggtgcagggtgaaaattgccatattgtcccgggatggaacgctctattcgtgtaagcggctgcgtgaagccgctatacagcgcggtcacctggttgaaattcttgatccgctttcttgctacatgaacataaatcctgcggcgtcttctattcactacaaaggccgcaagttaccccattttgacgcagtgatcccgcgtattggcaccgccattaccttttatgggacggcggcactgcgccagttcgagatgctggggagctatccgctcaatgagtcggtcgccattgcccgggcgcgtgacaaattgcgttccatgcaactgctggcgcgtcagggcatcgacctgcctgtcacgggcattgcgcattcgccggatgataccagcgatttaatcgacatggtcggtggtgcgccgctggtggtcaagttggttgaaggcacgcagggaattggcgtcgtgctggcggagacgcgtcaggcggcggaaagcgtgattgacgctttccgcggtctgaacgcgcatattctggtgcaggaatatatcaaagaggcgcaagggtgcgatatccgctgtctggttgttggcgatgaagtggtcgctgcgattgaacggcgggcgaaagagggcgattttcgttccaatttgcatcgtggcggcgcggcaagcgtcgccagtatcacaccacaggagcgtgaaatcgcgataaaagccgcgcgaacgatggcgctggacgttgctggtgtggatattctgcgtgctaatcgcgggccgttggtgatggaggtgaatgcgtcgccggggctggaaggaatagaaaaaaccaccggtatcgacatcgcgggtaaaatgatccgctggatcgaacgccacgctacgacagaatattgcctgaaaacgggtggttagtcgcaatcacattactgatcatggttttgcctgcgctttttgcgtaagctgtgccggtctttttatcgaaagaggttgtacaaaattatgacatcgctggtcgttcctggtctggatacgctgcgtcaatggctcgatgacctggggatgagtttttttgaatgtgataactgtcaggctctgcatctgccccatatgcagaatttcgacggtgtctttgatgccaaaatcgatctgatcgataacacgatcctgttttctgccatggcggaagtccgaccttcagccgtattgccgctggcggcggatttatctgccatcaatgccagttcgctgaccgtgaaagcatttcttgatatgcaggatgataatctgccaaagctggtggtttgccagtctttatccgttatgcagggcgtaacctatgagcagtttgcatggttcgtgcgtcagagcgaagagcagatttcgatggtcattcttgaagctaatgcccatcaactgctgttaccgactgatgatgaagggcaaaacaacgttaccgaaaactatttcctccactgataactcctttcgagcacgcagtcgctggtgcagtggctgcgcgctgcaaaattatctgctgtttttaaccttttcttaaagattatttcacttctcttgtgtcgatttggctttatcacatagagcaaatatgcataaaaatttgttaaataccgttttttaatccgagctatagtctcaaaccctggctaaagttattcttgcgatgcttttatatagcgagcagtgctggccgggagaaagttctcttttcttacaccgcgccgataaaaaatatgcacgtttattgcatatctttcagtgtgacaacttttgttcgtttgttaacgaactttcagaaggaaagagatatgaccgccttaaataaaaaatggctatcgggtctggttgcgggtgctctgatggccgtctctgtcggcacgctcgcggctgaacaaaaaacactccacatttataactggtctgattatatcgccccggacacggtggccaattttgaaaaagaaaccggtattaaagtcgtctacgatgttttcgactctaacgaagtactggaaggcaaattaatggccgggagtaccggctttgatctggtggttccatctgccagctttctggagcgccagttgactgcgggagttttccagccgctggacaaaagcaaattgccggagtggaagaatctcgacccggaactgctgaagctggtcgccaaacacgatcccgacaataaatttgctatgccctatatgtgggcgacgaccgggattggctataacgttgataaagttaaagcggtgctgggcgaaaacgcgcccgtcgatagctgggacttgatcctcaaacctgaaaatctggaaaaactgaaaagctgcggtgtctctttcctggatgcgccagaagaagtttttgctaccgtgttgaattatctcggcaaagatcccaacagcactaaagcggatgattacaccggaccggcaacagatctgctgttaaagctgcgcccgaacattcgttatttccattcatctcaatacattaacgacctggcaaacggcgatatttgcgtcgctatcggctgggcaggtgatgtctggcaggcgtcaaaccgcgcgaaggaagcgaagaatggcgtgaatgtctcgttctcgattccaaaagaaggggcgatggcgttctttgatgtattcgccatgcctgcggatgccaaaaacaaagacgaagcctatcagttcctgaattacctgctgcgcccggatgtagtagcgcatatttccgaccatgtgttctatgccaacgccaataaagcagccacgccgctggtgagtgcggaagtccgtgagaacccaggtatttatccgcctgcggatgttcgtgcgaagctgttcactctgaaagtgcaggatccgaaaatcgaccgtgtgcgcacccgcgcgtggaccaaagtgaagagcggaaaataatccgcagtcgtagatgccggaggggcgcaccacacccgccggcaattcgcaccattatggtgcgcttgcacacattcaatgccggagagcagccgtgaatgacgctatccctcgcccgcaggcgaaaacccgtaaggcgctgacgccgctattagaaatccgcaacctgaccaaatcctacgatggtcaacatgcggtggatgatgtcagcctgaccatctacaaaggtgaaatcttcgcgctgctgggcgcatccggctgtggcaagtccacgctgctgcgtatgctggcaggtttcgaacaaccttctgccggacagataatgcttgatggcgtcgatttgtcacaggttccgccttacctgcgccccatcaatatgatgtttcagtcttacgcgctgtttccgcatatgaccgtggaacagaacatcgcttttggcctgaaacaggacaaactaccgaaagcggaaattgccagccgggtcaatgagatgctcggcctggtgcatatgcaggagttcgccaaacgcaaaccgcatcagctttccggtggtcagcgacaacgtgtggccctggcccgaagccttgcgaagcgcccgaaactattactgctcgatgagccgatgggcgcgctggataaaaagctgcgtgacaggatgcagcttgaagtggtggatattctggagcgcgtcggtgtgacttgtgtgatggtcacccacgatcaggaagaggcgatgaccatggcggggcgcatcgccattatgaatcgtgggaaatttgtccagattggcgaaccggaagagatctacgagcatccgactacccgctatagcgccgaatttattggctcggtaaacgtctttgaaggcgtactcaaagagcgtcaggaagatggcctggtgcttgattcgccggggctggtgcatccactgaaagtcgacgcggatgcctcggtggtcgataacgtgccggtacatgtggcgctgcgcccggaaaaaatcatgctttgcgaagagccgcccgccaatggttgtaacttcgcggtgggggaggtgatacacattgcctatctcggcgatctttcggtgtatcacgttcgtctgaaaagtgggcagatgattagcgcccagctacaaaacgcccatcgtcatcgtaaagggttaccgacctggggcgacgaagtgcgtttgtgctgggaagtggacagctgtgtggtgctgacggtttaaggagcaaagatgagtacacttgaacctgctgcccagtcgaaaccgccgggcggatttaagctgtggttgtcgcagctgcaaatgaagcatgggcgcaaactggtcattgcgttgccatatatctggttgatcttgctgtttctgctgccatttctgattgtctttaaaataagcctggcggagatggcgcgcgctattccaccttataccgaactgatggagtgggctgacgggcaactgtccatcactcttaatctcggtaattttctgcaactgaccgacgatccgctctatttcgatgcttatctccagtcgctacaggtggctgcgatttcgacattttgctgtttactgatcggctatccgctggcgtgggcggtggcgcacagtaagccttcgacccgtaatattttattactactggtgatcctgccgtcgtggacctcgtttctgatccgcgtttatgcctggatgggaatattaaaaaacaacggtgtgctgaataattttctgctgtggctgggggttatcgatcaaccgctgaccattctgcataccaatctggccgtttatatcggcattgtttacgcttacgtgccgtttatggtactgccgatttataccgcgttgattcgtattgattattcgctggtggaagcagcgctggatctcggtgcacgaccgctgaaaacgttctttactgtgatcgtgccgctgactaaaggtgggattattgccggatcgatgctggtgtttatcccggctgtgggcgagtttgtgatcccggaactgctcggtggcccggacagcatcatgatcgggcgcgtgctatggcaagagtttttcaataaccgcgactggccggtggcctcggcggtagcgatcatcatgttgctgctgctaattgtgccgataatgtggttccacaaacaccagcaaaaaagcgtgggagaacacggatgaataatttaccggtagttcgttcgccctggcggattgtgattttgctgctgggctttacctttctctacgcgccaatgctgatgctggttatctattcgtttaacagctcgaagctggtgacggtgtgggccggctggtcaacgcgctggtatggtgagttattgcgcgatgacgcgatgatgagtgcggttggtttaagtctgacaattgcggcctgtgcggcgacggcggcggcgatcctcggaactattgcggcggtggtgctggtgcgctttggcaggtttcgcggatcaaatggctttgcctttatgatcaccgcgccgctggtaatgccagatgtcatcacgggcttgtcgctgttgttattattcgtcgcgcttgctcatgccattggctggcctgcggaccgcggtatgctcaccatctggctggcgcatgtcactttttgtacggcttatgtggcggtcgttatttcttcaagattgcgggaactggatcgctcgatagaagaagcagcgatggatctcggtgcgacgccgctgaaagtgtttttcgtcattacgctaccgatgatcatgcccgcgatcatttctggctggttactggcttttactttgtcgcttgatgatctggtgatcgccagctttgtttccgggccgggagccaccacgttaccgatgctggtcttttccagcgtgcggatgggggtgaatccggaaatcaacgccctggcaacattgatcctcggcgcggtcggaattgtcggatttatcgcctggtatctgatggctcgcgcagaaaaacagcggatacgcgacatccagcgtgcaagacgtggctgaagacactaaaatttgccaacctggctacataatgccgcgcatgtcgcggcattgttttcatggaagacgaaacgttgggattttttaagaaaacatcttcatctcatgctcgcctgaatgtgcctgcgctggtgcaggtggcggcgctcgccattattatgatccgtggcctcgacgtgctgatgattttcaatacgctgggcgtgcgcggtattggcgagttcattcatcgcagcgtacaaacctggagtttaacgctggtctttttaagcagtctggtgctggttttcattgagatctggtgtgcgttttcactggtgaaagggcgtcgctgggcgcgctggctatatctgctgacacaaatcaccgccgcaagttacttgtgggcggcttcgctggggtacggttatccggagctgttcagcattcccggtgaatcaaaacgtgaaatcttccatagcctgatgctgcagaagctgccggatatgctcatcctgatgctgctgttcgttccctcgaccagtcggcggttcttccagttgcaataatgtgtataatcgtcgcccctgatgatgtgaaggtcaatgtatgcagtgcgcactttacgacgcgggtcgctgtcgttcctgtcagtggataatgcagccgattccagagcaactctccgctaaaaccgccgatcttaaaaatctgctcgccgactttccggttgaggaatggtgcgcgccggtgtcaggcccggaacaagggtttcgtaataaagccaaaatggtggtgagtggtagcgttgaaaaaccactgctcggtatgctgcatcgcgatggcacaccagaagacctttgtgactgcccgctttatcctgcctcatttgcgcccgtttttgcggcgctaaaaccgtttatcgcccgagcggggttaacgccctacaacgtggcgcgtaagcgtggcgaactgaaatacattctgctgactgaaagccagagtgatggaggcatgatgctgcgctttgtactgcgttctgataccaagctggcgcaactgcgtaaggcgctgccgtggttacacgaacaactaccgcagctgaaagttattaccgtcaatattcagccggtacatatggcgattatggaaggggagacggagatctacctgaccgaacaacaggcactggcggagcgttttaatgacgtaccgctgtggatccgtccgcaaagtttcttccagactaatccggcggtcgccagccagttgtacgccaccgcgcgcgactgggtacgacagctgccggttaaacatatgtgggatctgttctgcggtgtggggggctttggtttacactgcgcgacgcctgacatgcagttaaccgggatcgaaattgcatcagaggccattgcctgtgcaaagcagtcagccgctgaactgggcttaacgcgtttgcaatttcaggcgctggactccactcagtttgccaccgctcagggggatgtgccggagctggtgctggttaacccgccgcgccgcggcattggtaaaccgctgtgtgattatctctcaacgatggcaccgcgttttatcatctactccagctgtaacgcccaaactatggcgaaagatatccgcgaactgcctgggtttcgtattgaacgggtgcagcttttcgatatgttcccgcataccgcgcactatgaagtgctgacgctgctggtgaagcaataaaaaagccgcatgtgcggcttcagattgctgacaaagtgcgcgttgtttatgccggatgcggcgtaaacgccttatccggcctacaaaagcgtgcaaattcaatacattgcatgggccatgtaggcctgataagcgtagcgcatcaggcaattttacctttgtcatcagtctcaagccgcggttgcggctttctgaatcttactgtgggaaccactggtcactgattttttgataagtaccgtcagctttaattgctgccagcgcgttattcagtttttccagcagggctttgttatccggacgtacagcgatgcccaggccggtgccaaaatattgcggatcggtcactttctcagtagcaacaccaagttgtggattggttttcagccattcgtttaccaccgctgtgtcaccaaataccccatcaatacgaccatttttcagatcgataaaggcattctgataactgtcataagagacagttttcacttccgggtgctgatcctgaatatatttctggtgcgtagtaccgttttccatcccaatacgtttgcctttcagatcggcaaacgttttgtaggtatcttttttggcaatcacgacggctgagttttcatagtagggcgtggtaaacgatacctgtttgctacgctccggggtgatatccataccggagattacggcgtcatattttctgaatttcagggacgggatcaggctgtcgaacgcgtgattagtaaaagtacattctgcctgcatttgtttgcacaaggcttttgccagatcgatatcaaagccgacaatctcattattagcacctatagattcaaagggtggataggtggctgaaacgccaaaattgattttctctgcggcagaagcaccgaaagtaaaggaagcaagtaaagcggcaagaactaactttttcatgatggaactcccgtctgtcaatcttatgatttttggccgtgtctgcggcatgggataacaatgccatcaagtgaatttatatgcaataaacatgattaaataatttaaatgaaataaaaaagacggacaacttagtgggttgtccgtcttcattataagaatttatgcactatgtaggccggataaggcgtccccgccgcatccggcacaggcaccgtgctgatgtctgatgcgacgctggcgcgtcttatcagacctacaaaaccccccggcgaatgtacgcagccacattaatttcgccgttcgaatgccagcgctttgcgctcgatcagacgcatcatcagcgtcagcaggccgttaacgaccaggtaaataatccctgccgcaccgaacaccattacatcgtaggtgcgtccgtacaacaactggctgtatcccatcacttccatcagcgtaatggtgtatgccagagaggtacttttgaataccagcaccacttcgttggaataagaagagagcgagcgtttaaaggcatacggcagcaggatcgccagcgtatcttttttgctcattcccagggcgctacaggactgccactgaccttccgggatcgcacgaattgcaccgtaaaacagctgcgtggtatacgccgcactattcagcgacaacgcaatcagcgcacataaccacggttctgacaacaaatgccacagtgccggatactcctgcaaagtcggaaactggcccggcccgtaataaatcaggaagatctgcaccagcagcggcgtaccggtaaacagcgtgatataaccccgcaccagccacaccagcaccggcgttttcagcgtcaggatgatggtaaaaatcaatgccagaatcagtgccacaatcagcgaggcaacggttagcgtcaggctggtgtgtagccctttcatcagttcgggtaaatactcaaacattagctgggcctccgctcaaaacgtgtcgcgcgcaggtcaatgcgtttgagaatgtactgactgagcagggtgatcaccaggtaaatcgccgccgccacaatgtaccaggtaaatggttcctgggtacgagtagcgatgctttttgtttgcagcattaaatcattcacactaatcaaactgaccagcgcggtatctttcagcagcaccagccactggttaccgaggccaggcagcgcatgacgccacatctgcggcatcaccagacggaaaaagatagccgatttcgacagccccagcgcctgaccagactcccactgacccaccggcaccgctttcaacgcgccccgaagcgtttgcgaggcataggcggcatacagcagtgacagagcgatgacaccacaaaggaacgggctaacgtcgaagttctcaatgtccatctgcactgggatctgcacgaacccaagattgatagtgaagccatccgaaagcgtcagcagcagctgcgaggagccaaaatagataaacagcaccaccagaatttctggcaggccacgcagaatggttaccagcgctgaacctgcccacgcgacaggacgccattttgccgactcccataccgcaaagaacatcgccagcgccagcccgacaatcaatgcacaaacggcaaggccgacggtcatcccggcggcgcttgctaaaggaaaaaattcattcatcaggaattacttctggaaccatttgttgtagatggtttcgtaagtgccatctttcttcactttttccagcgcagtgttgagtttctgctgcagctcagtgttgccctgacgtaccgcgatgccgaggccagtgccgaagtaatctttatcggtcactttgtcgcccaccgccgccagtttcgggttatctttcagccactcagtgaccactgcggtgtcaccgaagacgccgtcgatacgcccgttttgcagatccagttttgcgttctggtagctgtcatacggaacggtagtgatttccgggtgcttatccataatgaatttctggtgtgtcgtcccgttctgtacgccgacttttttgcctttcagctgatcaacactggtgtatttgccttgctgacccacaaacagggcagagttgtcatagtacggggtggtaaacagcacctgcttttcacgctccggagtgatatccatgcccgccatcacggcttctacgcgacggaatttcaggcttgggatcaggctgtcaaacgcctggttagagaaagtgcaggttgcatcaatctctttacacagcgcttgtgccaggtcgacgtcaaaaccaacgatctggttgtttgcatcaatcgattcaaacggaggataggaggcttcggtagcaaaacgaatggtttcggcagctgtggcggaaagactaaaacctgcaattaacgcggcaatcagaacttttttcattgttgttatcccgaatcttagtgagagagatagtttttaaatgcttcggtttgcggctcggtaaagcagctcgcgtcgccttgttctacgatatgaccattttccatatacaccactcggctggcggttttacgcgccacttcaacttcgtgggtgacgatcacctgggtaatattcgtttctgccagctcacgaatgatgctgacgatttgtgccgtaatttccgggtccagtgcggcggtcggttcatcgaacagcagtacctgcggttccatcatcaacgcacgggcaatagcaacacgctgctgctgaccaccagaaagatgcagcgggtaacgatcgctataaggtttgagacgcagacgttccagcagtttttctgcacgggccagcgcctgatctttactcaaccccagtacacggcagggcgcttcaatcaggttttgctgcacggtcagatgcggccacaggttgtattgctgaaacaccatgccaacgttacgacgcaaatcgcgaatcgctttgtcagagggtgttttggtgaaatcgaaatggttgcctgcaatgttgagcgtaccggagcgcggcatctcaagcagattgagtacacgcagcagcgagcttttacccgcgccgctggggccaagtaacaccagcgtttcgccctgtgggcaatccagcgtgatatcgaacagcgcctgatgcgcgccgtagaagcaattaatgccgtttaattgaatactcattgacactcgtatactggcagtctgatagctattgaggtcgaagatagtacctttgacagaataattatgcaatatttctgctttaaaagttaaaagcaaagcgcattattcaataaacatagcacaaaataacgggggcggtggtcggcgagcataaatgtcggcattcctcacgaaatgccggacaatttacggggtttattggttgatcaaggcgttagcgattctcgatggactgacggagcgtacccgccgtggcatgaacgctaccgcctaagtaacgcacatcgtcgatgacccaacactggccttcctgaatcattaacacttcatcctgccaaccctggtcaccctgtttgagatccacgcgcaatggaatgttacgggcatcacgattagggatagtcgatgcactggcaacgtgggcgctatctggcaaggtggttcgactggagaatggatcgttggtcagtagttcccgatggttattatcccgggaggcatcgctaagcagtgtcgccagtttgtcgctcagataagggcgcaaggcggtgatgtcgttgctgcggtgcaaaatgcggtagtcataaaattgctgggccacgttatccgggcctccttcaacgcaaggaccactgcgtgtgccgttatctttataagctggagtgactgtggtgcaggcactgaggagcagtgcgcaggggataagcattgtcaatttgctgtagcgcataatgatttccttataagcgatcgctctgaaagcgttctacgataataatgatatcctttcaataatagcgtatcagtctgataatgcttttgagatcgaaggcttagcaaacaaggagatcgatcatgcaattttctacaaccccaactctggaaggccagaccatcgttgaatattgcggtgtggtgaccggcgaagcgattttaggtgccaatattttccgtgatttctttgccggtatccgcgatatcgttggcggacgttccggtgcgtatgaaaaagaactgcgtaaagcacgggagatcgcctttgaggaattaggctcccaggcgcgggcgctgggggccgatgccgtcgtcggtattgatatcgactacgaaacggtcgggcaaaacggcagtatgctgatggttagcgtcagcggtacggcggtgaaaacgcgtcgatgagaagattcttctggctggtcgctgccgctctgttattggcagggtgtgcaggcgaaaaaggcattgtcgagaaagagggatatcagcttgatacccgacgccaggcgcaggcggcgtatccgcgcattaaagtgctggtgatccactacaccgcagatgattttgatagctcgctggcgacactgaccgataagcaggtcagctcgcattatctggtccctgcggtaccaccgcgatacaacggtaaaccgcgcatctggcaactggtgccggaacaagaactggcctggcatgcggggattagcgcctggcgcggggcaacgcgccttaacgacacctctattggcattgagctggaaaaccgtggctggcaaaaatcggccggagtgaaatattttgccccgtttgaaccggcacagattcaggcgcttattccactggcgaaagatattattgcccgttatcacatcaagccggaaaacgtagtggcacatgcggatatcgcaccgcagcgcaaagacgatccggggccattatttccctggcagcaactggcgcagcaggggattggtgcctggccggatgcgcagcgggttaacttttaccttgccgggcgcgcgccgcacacaccggtagataccgcgtcattgctggagcttttggcgcgctacggttatgacgttaaacctgatatgacaccgcgcgagcagcggcgcgtgattatggcattccagatgcatttccgcccgacgttatataacggcgaagcggatgcagaaactcaggcgattgccgaagcattgctggagaaatacgggcaggattagcgcggcagttttccgtggtcgcgtagccaggcggcagttttctcgataccttcatccagggtgatgaccggctgataacctaactcttcctgcgcacgcgtaatatccagcgtaaagtcaaaattcaacttggagacgccgtagtgggtcagcggcggctcttttgctgacttgcggcctaaacgctccatgctgcgggcgatcatatccagcatcgggtaggggacggaacgaatacgacagtcaatattcaactcgtcgatcagcttctgcacgatgctgcgcagtgtgcgatgctcgccgttggtgatgttgtacacacgcccggaaggtagcttatcgcaggcttcctggcttgccagccacattgcgtgcacggcattttcatagtaggtcatatcgaccagcgcactgccgccatgcggtaacagaatactgccgtagtggtgcatcatatgcgccagacggggaataaagactttatcgtgcggtccgaacagactttgtgggcgcagaatagtaaagcgcgtttgtggattcgcctgcgaaagcatattgatcacttcttcgctggctgctttgctgcgggcaaactcgttggcgaagcggtgagggcgaaaatcttctttaatatcgcgatggtggtgataatcgaagtacagggagggggaagagatatgaataaagttacgcacaccccaggcgacagcccattcacccaggcggcgagtggcgcgaacgttagccagatcgaaagcctgttgtgtcccccagggtgaggtaaagctggagcagtgccacagcgtatcaatgcccgcgagcatcactttagcttgtgatgaaaccagctcggtcagatccgccggaacaaactctgcgcccattttttccagcaatttgcccattgcctcgttgcgaccggtcgctcgcacgctgatgcctttctggcataaaaactctaccgcgtttcgacctaagccgctggtggcgccggtaaccagtaccttcatatcaatccactgttgttgagaaaataacgtgcgcattcttccgtgatttcccccatgatgcaatgggaaacatgaaagaataacgcaggttttgtcgattaatctgtgctttgttctgccagtctggcgatttgttttgccattccgcgaaaaataaacagatgcgcggggatcatcaataaccagtaaaacagccccggcataccgtgcggatgccagaaagcgcggacatcgatagtacgatagtcgcctttatcttccaggctaaaacacagtcgtcccagccccggcgctttcatgccaaataacaacgtaagttgtttttccggttcaacgacaatcactttccagctatccaccgcatcgccagtctgtaaatattcgcgctccgggcggcctttcgccagcttatgaccgatcgcgcggtccatcaacgcccgtgtctgccacaaaatattgccaaagaaataacgctctttaccgccgatttggttcactacctgccataaagcagcaaggctggcggacgttttaacggtaaaccccgcctgtttggcaaaataaccgtactccggtcgccagcgggcaaaggcctgagcgtcgtagccccagtcgctggagttgaccagtttttcctcctctttcaacgtgctacgtaccgcgtcatcgaaagcgatcagccgttgtgggatgagtgcacgtagcgcggtatcatccgccagcagatcgtgtttcagcccctgaatcaacgccctggcggtggtgggcggtacggaagtaatcacattgagaaaccacaccgaaatccagcgggtggggagggggatggggatcaaccagcggcgcttaccgctcaccgccataaaatgttcaaactgttgctgataactgagcacctctggtccggcggcttcgaagatgcggtgttcgctggccggatgatctaacaacgcaaccagatagtgcagcaagttttccagcgcaatgggcgtggtgcgtgaacgaacccagcgcggaggcgttaagactggcaggttgtagaccatatcgcgcatgacttcgaacgccgcggaacctgcgccaacgataattccggcccgcagttcggtcacgggtacattcgcttcacgcagaatgtccgccgtagcctgacgagcacgcagatgatccgactgctcatgtggcggggcctgcaacgaactaagaaagattaattgcttaactggtacttcacgtagcgcatcgcggacgttgagagccacctggcgctcctgagcgataaaatcgccgccttcgcccatgctgtgcaccagaaaatagaccgtatcgatatcctgcaacagggccggtaggttatccggccagctgagatcgactttatggcaactgacgtttgccagttgcagctttgcaagcctgtcgacatgacgtgccgccgccaggatctgatgcccttgctggctgagtgtgcgcaccagatgctgaccaatgtagccactggcaccgagaactaaaatgcgttgcggcacgtctctctccttaacgcgccaggaatgcacgccagtgggcggcgacttccgccagttgttcgcgcgagacgtcaagatgcgtcaccaggcggacaatcggcgaggcgttaatcagcacgtttctcgctttcatgtattcgcctaacgcggcagcattttcttccccgacgcgaacaaacagcatattggtgtcctgacgcatcacatccgcgcctgcttcacgcagctgctccgccatccaggcagcgttgtcgtggtcttcctgcaagcgcgcaacgttatttttcagggcatatatcccggcggcagccagaatgccggactggcgcatcccgccacctgtcattttccgccagcgaatggcacgtttaatgtaatcacgattaccgacgagtaatgaaccgactggcgtcccaagacctttcgacaggcaaatggtgaacgaatcacaatattgcgtgatctctttcagttcgcagccgtaagccaccacggcattaaagatgcgcgcaccgtcaacatgcagcgccagattgcgctcgcgggtaaattcccatgcttctttcaggtattcccgcggcaacactttgccgttgtgggtgttttccagactgagtaatttggtgcgggcgaaatggatatcgtcgggtttgattttcatcgccactttatccagcggtagcgtgccgtcggcagccgcgtctatgggttgcggttgaatactgcccagcaccgccgcgccaccggcttcaaacagatagttatgcgcggcctgaccgacaatatactcttcgccgcgttcgcagtgactgagcagagcgaccaggttggcctgagtgccggtaggcagaaaaatggcggcttctttaccggaaagctctgctgcgtagtcctgcagagcattaacggtagggtcgtctccgtaaacgtcgtccccaaccggggcggccatcatcgcttcgagcatggcgcggcttggtcgggtaacggtatcactgcgtaaatcaatcatggcatgtccttattatgacgggaaatgccaccctttttaccttagccagtttgttttcgccagttcgatcacttcatcaccgcgtccgctgatgattgcgcgcagcatatacaggctgaaacctttggcctgttcgagtttgatctgcggtggaatggctaactcttctttggcgaccaccacatccaccaacaccggaccgtcgatggagaaggcgcgttgcagggcttcatcaacttcagacgctttttctacacggatacccgtaatgccgcacgcttcggcaatgcgggcaaagtttgtgtcgtgtagttcggtgccgtcagtcaaatagccaccagctttcatctccatcgccacaaagcccagcacgctgttgttaaagacgacaattttcactggcagtttcatctgcactactgagaggaaatcgcccatcaacatgctaaaaccgccatcgccgcacatggcgaccacctgacgttctggctctgtcgcctgcgcacccagcgcctgcggcatggcgttagccatcgaaccgtggttaaacgaacctaacaggcgacgcttgccgttcatttttagataacgtgccgcccacaccgttggcgtaccaacgtcacaggtgaaaatagcgtcatcggcggcaaaatgactaatttgctgcgccagatattgcgggtgaatggctttctcgctcggtttagctaaatcgtccagccctttgcgggcgtcgcggtaatcttccagcgctttatccagaaacttgcgatcggctttttcttccaccaatggaagcaatgcacgcagagtcgacttgatatcgccgaccagtgccatatccaccttgctgtgagcgccgatgctggctgggttgatatcaatctgaatgattttggcatcggtcgggtagaaggcgcggtagggaaattgcgtgccgagtagcactaacgtgtcggcgttcatcatggtatggaaacctgacgagaagccgattaacccggtcattccaacatcatacggattatcgtattcgacatgttctttaccgcgcagggcatgaacaataggcgctttaattttcccggcaaactcaactaactctttatgcgcccccgcgcagccgctgccacacatcagggcgatattgctggaataacgcagcagttgcgccagtttgcgtaactcttcttcttccggcgtcacgactggttgtggcgcatgataccagtgcatggttgccccttctggcgcaggttttaacgccacgtcgcctggtaacacgacaaccgaaacgccacggttaagcaccgctttgcgcatggcaatcgccagtacttgtgggatctgctccgggctggaaaccagctcgcaatagtgactacattcgcggaatagctcttgtgggtgggtttcctggaaatagccgctgccaatttcgctggagggaatatgagcggcaatcgccagtaccggaacgtgattgcggtggcaatcgaacaggccgttgattaagtgcaggttgccggggccgcacgatccggcgcagaccgccagttctccgctaagttgtgcttcagcgccagcggcaaaggccgccacttcttcgtggcgggtggacatccactcgatggtgcccatgcgattaagactgtcactaagaccgttcagagagtcgcctgtgactccccagatgcgtttcacccctgccgattcgagtgttttggcgatataagctgcaaccgtttgtttcatggttctccatctcctgaatgtgataacggtaacaagtttagttcatctgacggagggggaagggatgggagagaaaggaggcactaacggttaaatagcccgatgaaaggaatatcatcgggcataaggcgattatgcgagaaccaaatccccctgcggatggcaggagcaggccagtacgtaaccttcagcgatttcggcgtcggtcagcgtcattgtgctgctcaccgtatattcaccggaaaccacttttgtcttacagcagccgcaaacacccgcacggcaggcagcgacaaccggaacgttattgctttccagcgcctccagtagcgtggtgccaaccggggcgtaaaattctcgtgccggttgcagtttggtgaatttcagaccgctggtcgccgcttctgctactggggtgaagaatttctctttaaagaaacgcgtcacgccgagcgctttcacttcctgctctacccaatccatatacggagccgggccgcaggtcatcacggtacgtgaagctaagtcaggtacacctgccagcagttcgcgagtgagacgaccagcgataaagccttcggtaacgttattttctgccaccagcgttaccggatagttacgccactcatcggcgaaaataacatcctgcggcgtacgcacgttgtagatcacccgcacatcggcctgtggacggttcttcgcaagccagcgacgcatcgacataatcggcgtgacgccgcagcctgccgccagcaacaggaatttatcttctgctttatcgtcgcaggtaaattcccccatcgcgtccgaaagccagagataatcaccgcgttttacatcgcgcgtcagccactgggagccgacaccgtcatcaatccgccgcacggtcagggtgatatattcactcacgcctggcgtggaggaaatggtgtaagcacgcagcgtttccgctgagtttcgcacgctgaccagtgcatattgcccggcgcgatatgggtagtaatcgtggcaaatcagggaaatcgtccacacatccggcgtttcttgcgtaatgtgatgaacctgcatccgccacgggcattgattcgttggcatcgtcatcgacaaactccttacgcgctcaacagttgcttcatgtcttcttcaacagtggtgatagaacgcaggccgaatttctcgttcagcaccgccagcaggtctggtgtcaggaaaccaggtgcagtcgggccggtgacgatatttttcacgcccagagaaagcagcgtcagcagaatgacgatcgctttctgttcaaaccaggagagcaccagcgacagcggcagatcgttgacaccgcagcccagtttctctgccagagtgacagccagaataatcgctgagtaagcatcgttacattgacctgcatctaccagacgcggcagaccttcgatatcgccaaactcaagtttgttaaagcgatatttaccacaggcgagggtcaggatcaggcagtcatccggcacgctggtggcgaaatcggtgaagtagtggcgctcgccgcgtgcgccgtcacagccaccaagcaggaagatatgacgcagtttttcacggctcaccagatcaatcagcgtatcagcagcgccaagcagcgtctggcgaccaaaacccacggtgataaggtgcggaatttcgctgtacgggaagcctgccatctgttgcgcctgggtgataaccgcagagaaatcatcaccgtccagatgacgcacgccaggccagccaacaatgctgcgggtccagatacgatcgtcataagcgcctacggttgggtcgatgatgcagttcgaggtcatcacgatggggccagggaaacgagcgaactccacttgctgattctgccagccgctgccgtagttaccgaccagatgcttgaatttacgcagctccgggtagccatgcgcaggcagcatttcgccgtgggtgtagacattaacgcccgtgccttcggtctgttccagcaggttgtagagatctttgagatcgtgaccggaaatcagaatgcatttacccgccgtcgctttgacgttgacctgggttggcgtcgggtgaccgtatttaccggtttcgcctgcatccagaatgctcatcactttgaagttcatctggccgatttccattgaacactcaagaagcgcgttcatatcggcaggccaggtccccagccacgccatgattttatggtactgggcataaatatcgttgtcgtattgaccgagaacatgcgcgtgttccatataggccgccgcacctttcaggccatacaggcacagcagacgcaggccgagaatgttttcgccaatcgccgctttatctttgttaggggtaaattctgctgcctgacgttgcagctcgccgagatcgtcgctcaccagttgcaggtcagccatcgggttatcgacgcgcgcgttggcatctacagccaggcattgcgctttcagcgcctcgcgcagggcaatcgcttcacgagcgtagccgacaatacgcggagaatcgaagttaacgttggtcagggttgagaaaaaggcacgtggcgcgaagctgtcaacatcgtggttgatgatgccgtattcacgcgcttttaccgcccaggcagaaagcccttgcagcgccgcgatgagtaaatcctgaaggtcagaagtttccgccgttttaccacacatcccctgcgcgtatgagcagccgtttcctgccggagtacggatagtttgttcacattgcacacaaaacatgatcacaccttttaaagttatatttaatatacatgtttaaggttaagacgcttaacgcggggataaaagggatttttcatgcaactttaagggagattgatttagcgcaattttggcggcagggatctaccgccagagaggtattacgcagagaaaaaggcgatgaggatcggcactaacaggctaagaataaaaccgtgaacaattgccgccgggaccatatccagcccgccagtacgttgaagaacgggcagggtgaaatccattgatgtggcaccgcataagcccagtgcagtagagcggctgcggcgaatcagcccagggatcaacataatagcaatcagttcacgggccagatcattaaaaaacgccgcgctcccgattaccggaccaaaagattcggtcaataaaataccggaaagagaataccagccgaaaccggaggccattgccagcgcggtattgatggggagatcaagaataaaggcgttaattaaaccaccaattaatgaactgacaaccaccaccacggcgacaatcattccccggcgattaaggacaatctgctttaaggtcatgccattattgcgcaactgaataccaacgaggaaaagtagcaaaattaacgtgtattcactggcttcggtcgcgtgttgtaagaaagccagtccacttagaccaatggcaaaaccaatcactactacgccgcacagttttagcgactccagcgccatcgcaatacgcgacgggagtttttcttgctgatggtggttgcgccacggcaggcctcgctccagccacatcagggcggcaatattacacagtaaaataacggtaatactgacggcagaataatgcagaatcgccaacaggttactggcgaggttatcgagaaacgccagactgatacccataaaaaagagaataaggtaaaccatccagcttaatagctgattaataacttttaacgcagcttgttggcgaagcggaatgaggtaacccacaatcaggggaaccagaatgattaacagcccagaaaacatgaaaacccagtccttgcaaagatgaagtcgaaatgcgcgatgacacactactgaaagcggaaggacgagtaaagttgcaattaaaaggaaatgttatgcataaggagcagtagagtattcgttttcatttaaagatattcttgcgctttaattacaaactgcaccgatgttggtggcgtcaaaatcgccgaggcgttccctgaaggccggggcagcccacatggatgtgggctgagggcgcgttttacagggatgttacctcgcgcccgacccggtagccgtaagggataagtcgagggcaccgcgcagcggcgattttgttcgccagagcccgggggtgcagggggcggcggcgattggccgccccctgcgcgctccttgcgccagtggcaatatgttgcttagctcatgaaaggagcgcaacaagatgatgaatcaacatataacaacatcttaaaaaaaggcctgacattacgccaggccttctgcgttaattaatcacgcttttccagcagggtccggtaaatcagaccaccgataatgccgccgacaattggcaccacccagaagaaccacagttgttctaatgcccagccgccctggaagatagcaaccgcggtgctgcgcgccgggttaacagaagtgttagtcaccggaatactaattaagtgaatcagggttaaggccagaccaatagcgatcggcgcaaaacctgccggcgcgaatttgtcggttgcgccgtggatcaccaacaggaaacctgcactcaataccagttcaactaccagcgcggaaagcatggaataaccgcctggtgaatgctcgccataaccgttagaagcaaaaccgctggctgccgcgtcaaaacccgttttaccactggcaattaaatacagcagcgccgctgcaacaataccgccgacaacctgggcaattacgtagccaacgacttcttttgccggaaaacgtccgccagcccataaaccaatagtgaccgccgggttaaaatgaccaccagaaatatgaccaacagcaaaggccatcgtcagaacggtcagaccgaacgccaacgccacgccggcaaaaccaatgcctaattccgggaagcctgcggccagtacagcactaccacagccaccaaaaacaagccagaaagtaccaaaacattcagctgctaattttctgaacatatccaccacaattaaaaattgaccctgtgaaaaatatggtcgttttatagggtcgtcgtaaaaaagtgacgacggaaataatgcgcggctattttaaaaacgaaggcgagtcattcaccagataaataaatccagtaaatttgatttagggcaacagcgggttgccccatatagtcatttgtctgattgacagtgtagtgcacgcaaaagatttaatcctttaggcgtaataaaaaataatttatcatgctaattatttgattttgttgtttttgcagacttatcagcaagagggagtataacgcgattattcgctcatttttcagacatttgccatgcttaaatgtgatgtcatcacgtattagcaaggcctttcccgttatactgccagcgtaaaggataagtcacatatttctggaggggatatgattcttgagcgcgttgaaattgtgggttttcgcggtatcaaccgtttgtcgttgatgctggaacaaaacaacgtcctgattggggagaacgcgtggggtaaatccagcttgctggacgccttaactctgctgctatcgccagaatcagatctctaccattttgagcgcgacgatttctggttcccgccgggagatatcaacgggcgagaacatcatctgcatattattttgaccttccgcgaatcgctgccaggccgacatcgggttcgccgttatcggccgctggaagcgtgctggacgccatgcaccgatggctatcaccgtattttttatcgtctggaaggggagagtgcggaagacggcagcgtgatgacactgcgcagttttctcgataaagacggacatccgattgatgtcgaggatattaacgatcaggcacgccatctggtgcgtttaatgccggtgctgcgcttgcgtgatgcccgttttatgcgccgtattcgtaacggcacggtgccaaatgtccctaatgtggaagtcaccgcgcgccagctcgatttcctcgcccgtgagttatcctcacatccgcaaaatctctctgatgggcagattcgtcagggactttccgcaatggtacagctgcttgagcattatttctctgagcagggggccggacaggcgcgatatcgtttaatgcggcggcgagccagcaatgagcaacgaagctggcgctatctggatatcatcaaccggatgattgaccgacctggtgggcgctcgtatcgggttattttgctcggcctatttgctactttgttgcaggcaaaaggcacattgcgactggataaagacgcccgtccattgttgctgatcgaagatccagaaacccgtttacaccccattatgctttcagttgcctggcatctgttgaatcttctgccattgcagcgcattgccaccaccaactcgggtgagttgctttcgttaacgccggtagagcatgtttgccgactggtacgtgagtcctcgcgcgttgccgcctggcgtctggggccgagtggcttgagtaccgaagatagccgacgcatatcctttcacattcgttttaaccgtccgtcatcgctgtttgcacgctgctggttgctggtggaaggggaaacggaaacctgggttatcaatgaactggcgcgtcagtgcggacatcattttgatgccgaagggatcaaggtcattgagtttgcccagtccgggctaaagccactggttaaatttgcccgccgaatggggattgaatggcatgtactggtcgatggcgatgaagcagggaagaaatatgccgctacggtacgcagcctgttgaataacgatcgggaagccgaacgagaacatttaacggcgttaccggcgctggatatggaacattttatgtatcgccagggattttccgatgtgttccaccgcatggcgcaaatcccggaaaatgtaccgatgaatctacgcaaaattatctcgaaagcgatccatcgctcttccaaacccgatcttgccattgaagtggcaatggaggcaggacgtcgtggtgtggactccgtaccgacgctgctgaaaaaaatgttctcacgcgtgctgtggctggcgcgcggtcgcgcggattaaccgcgaaacatcgtggccatttgtggctgaatagcgtcgagcatctcatagcgccgacggtattcagcccgttttttactggcgatttcggcaatctcttttcgtgctatctgtgctggaaggcggtaatggcgttcagcatcacatacgccgccaaccgattcccagaaagcgttgtaatcagcgtggatcttgccttctttatcgcgataacgcaggctgcggtaaatatgcgtttcattgctgacggcaataatctgctctacctgcaaacgttgggcaaacagacaggccgcttccatcacgaggcgtttgggaaatagcccgtggcaggctttcgtcgcattctggatttcctgatgtggaatttcccattttgcgccttgcagtccgccaataaacatcgttcttttcccctgatattcacacagggtaaacgtgatctctgccagaggaataccttcgctgttgcggaacaggattgtgctgtcaccttctttatccattgagatcatcatggtcagctcaagcgtgaactgctcgccgtttttgccttccagcttcgccagttgcagcccgggggtattcaaatataagctgaattcttccgccgacatacattcgcggagtaacgcataatggtaacgtaacgcctccagcaattgcttacggctaagattcgccgcaaggtaagggcgatgcagacgcacaggcagtcgcggctggcgcgttaacaatacattgagattaggccagtgggaaagttcgttcatccactcaacgcttaaacgcggcataatcaacgagcgcagcaaaaatttctggcgaaaactacggcgatgccagaatttacccggccgacactgtccacgtgccagactaagaaaaagtgacaggctgctgagagattcagatggcgtaaaggtccgttcagttagctgcgacatattcatgaaatcaatggttatacatggcgtcgatttcaccattgcgtatcttaaccaaacatcaatagtgtgattactaacgtaaattttagggttttgttgatatttcgttgaagttaatgacccggattggcatatggagtattcagaaaatttatgaaaaagcggaaaaccgtgaagaagcgttacgttattgcgctggtgatagtcatcgccggactgattacgttatggagaattcttaacgcacccgtgccgacttatcagacgctgattgtgcgccccggtgatttacagcaaagcgtgctggcgaccggaaagctggacgcgctgcgtaaggttgatgtgggcgcgcaggtcagcggtcagttgaaaactctgtcggtggcgattggcgataaagtaaaaaaagaccagcttttaggggttattgatcctgaacaggctgaaaaccagattaaggaggtcgaagcaacgctgatggagctacgtgcgcagcggcagcaggcggaagcggagctgaaactggcgcgggtgacgtattcccgtcagcaacgtctggcacaaacgaaggctgtttcacagcaggatctcgacaccgccgcgacggagatggctgtgaaacaggcgcaaattggcaccattgacgcgcaaatcaagcgcaatcaggcttctctcgatacggctaaaaccaatctcgattacactcgcatcgttgccccgatggccggggaagtcacgcaaatcaccactctgcaaggccagacggtgattgccgcacaacaagcaccgaacattctgacgctggcagatatgagcgccatgctggtaaaagcgcaggtttctgaagcggatgtaatccacctgaagccggggcaaaaagcctggtttacggtgcttggcgatccactgacgcgctacgaggggcaaatcaaggatgtactaccgacgccggaaaaggttaacgacgctattttctattacgcccgttttgaagtccccaaccccaatggtttgctgcggctggatatgactgcgcaagtgcatattcagctcaccgatgtgaaaaatgtgctgacgatccctctgtcggcgttaggcgatccggttggcgataatcgttataaagtcaaattgttgcgtaatggtgaaacacgcgagcgtgaagtgacgattggcgcacgtaacgataccgatgttgagattgtcaaagggcttgaagcgggcgatgaagtggtgattggtgaggccaaaccaggagctgcacaatgacgcctttgctcgaattaaaggatattcgtcgcagctatcctgccggtgatgagcaggttgaggtgctgaagggcatcagcctcgatatttatgcgggtgagatggtcgcgattgttggcgcttcgggttccggtaaatcgaccctgatgaatattctcggctgtctggataaggccaccagcggcacctatcgcgtcgccggtcaggatgttgccacgctggacgccgatgcgctggcgcaactgcgccgcgagcatttcggctttattttccagcgttaccatttgctttcgcatttaaccgccgagcagaacgttgaagtacccgccgtctatgctggtcttgagcggaaacagcgactgcttcgtgcccaggagttgctgcaacggctggggctggaagaccgtacagagtattatccggcacagctttcgggtggtcagcaacagcgcgtcagcatcgcgcgggcattgatgaacggtggtcaggtaattcttgccgatgaaccaaccggcgcactggacagccattctggcgaagaggtgatggcgatcctgcatcagctgcgcgatcgtgggcatacggtgattatcgtcacccacgatccgcaggtcgctgctcaggccgagcgggtgatcgaaattcgcgacggcgaaattgtgcgcaatcctcccgccattgaaaaagtgaatgttactggcgggacggaacctgttgtcaacacggtgtctggctggcggcagtttgtcagcggttttaacgaggcgctgacgatggcatggcgggcgctggcagcgaataaaatgcgtactttactgaccatgctggggattattatcggtattgcgtcggtggtttccattgtcgtggtgggtgacgccgccaaacaaatggtgctggcggatattcgttctattggtacgaatactattgatgtctatcccgggaaagattttggcgatgacgatccgcaatatcagcaggcgctgaagtacgacgacttaatcgccatccaaaaacaaccgtgggtcgcctcagccacacctgccgtctcgcaaaacctgcgcctgcgttataacaatgttgatgttgctgccagtgccaatggcgtgagcggcgattattttaatgtctatggcatgaccttcagtgaaggaaacacctttaatcaggagcagctgaacggtcgtgcgcaggtcgtggttctcgacagtaatactcgccgccagcttttcccccataaagcagatgtggttggcgaggtgattctggtcggcaatatgcccgccagagtcattggtgtggcggaagaaaaacagtcgatgtttggtagcagtaaagtgctgcgtgtctggctaccttacagcacgatgtccgggcgagttatgggccagtcgtggcttaactccattactgtcagggtgaaagaaggatttgacagcgccgaggcggaacagcaactcacgcgtttactttcactgcgccacggaaagaaggatttctttacctggaacatggacggcgtcttgaaaactgttgaaaagaccacacgtactttacaactgtttctgacgctggtggcggtgatttcgctggtggtgggcggtattggtgtaatgaatattatgctggtgtcagtgaccgagcggacgcgggaaattggcattcgcatggctgtaggtgcgcgagcaagcgatgttttgcaacagttcctgatcgaagccgtactggtttgcctggtcggtggcgcgttgggaataacactgtcactgttaattgctttcaccttgcagcttttcttacccggctgggagattggtttttcaccgttggcgctgctgctggcgtttctctgctcgacggtcaccgggattttatttggctggttacccgcacgaaatgcggcacgactggatccagtagatgctctggcacgagagtaatttttgagataaaaatgccagccgatcgggctggcattttgcctttaggatgtacacaatgagacagaagagctatgcgactgccgcttctacttcgacgggcacaataacactggcgtgattgccttttggcccctggtggacatcaaactgaacggattgtccagcttttagcgttctgtaaccatccatctgaatggtggaataatgagcgaaaatatcttcgccgccgccttcagggcagatgaaaccaaaccctttggcattgttgaaccacttaacagtacccttttccatgcttcgacatccttcgcaaatcttatacaagtaagatggaataaaccggggtcagagagggggctgttcaaaacctcgccaactctagaaatacaatttagagaattagggcgagccgtcaagcatttgacaggggacaaggggcaggtatgaatcaaaaatttgaagcagttaacgctattgacaggaatgtgacagatgtcgctgatgccaacgatagatgatagttatctatcatgtggagtagattggtcaggcaaataagctcttgtcagcggcagggcgttctgccgataaccgtaaccgaagatgataactgacaatgggtaaaacgaacgactggctggactttgatcaactggcggaagaaaaagttcgcgacgcgctaaaaccgccatctatgtataaagtgatattagtcaatgatgattacactccgatggagtttgttattgacgtgttacaaaaattcttttcttatgatgtagaacgtgcaacgcaattgatgctcgctgttcactaccaggggaaggccatttgcggagtctttaccgccgaggttgcagaaaccaaagtggcgatggtgaacaagtacgcgagggagaatgagcatccattgctgtgtacgctagaaaaagcctgaatgcaggcataaaaattgggggaggtgcctatgctcaatcaagaactggaactcagtttaaatatggctttcgccagagcgcgcgagcaccgtcatgagtttatgaccgtcgagcacttgttactggcgctgctcagtaacccatctgcccgggaggcgctggaagcgtgttctgtggatttggttgcgctccgtcaggaactggaagcctttattgaacaaaccacacccgttctgcctgccagtgaagaggagcgcgacacacagccgacgctgagttttcagcgtgtactgcaacgtgcggtcttccatgtccagtcctccggtcgcaatgaggttaccggtgcaaacgttctggtcgctatctttagcgaacaggagtcgcaggcggcatatctgttgcgtaaacatgaagtcagccgtctcgatgtggtgaactttatctctcatggcacgcgtaaagacgagccgacacagtcttctgatcctggcagccagccaaacagcgaagaacaagctggtggggaggaacgtatggagaatttcacgacgaacctgaatcagcttgcgcgcgtgggcggaatcgacccactgattggtcgtgagaaggagctggagcgtgctattcaggttctctgccgtcgccgtaaaaacaacccgctgctggtgggggaatctggtgtcggtaaaaccgcgattgcggaaggtcttgcctggcgaattgttcagggcgatgtgccggaagtgatggctgactgtacgatttactctctcgatatcggttctctgttagcgggcacaaaatatcgcggcgactttgaaaaacgttttaaagcgttgctcaagcagctggagcaggacactaacagcatcctgtttattgatgagatccacaccattatcggtgcgggtgcagcgtctggtggtcaggtcgatgcggctaacctaatcaaaccgttgctctccagcggtaaaattcgtgtaattggttcgacaacctatcaggagttcagcaacattttcgagaaagaccgtgctctggcgcgtcgcttccagaaaattgatattactgaaccgtcgatcgaagaaactgttcaaatcatcaatggcctgaaaccgaagtatgaagcgcaccacgacgtgcgttataccgcaaaagcggtgcgtgcggcggtagagctggcggtgaaatacattaacgatcgtcatctgccggataaagccattgatgttatcgacgaagcgggcgctcgcgcacgcctgatgccggtaagcaaacgcaagaaaaccgttaatgtggcggatattgagtccgtggtggcccgtattgcacgcattccagagaagagtgtttctcagagtgatcgtgataccctgaaaaacctcggcgatcgcttgaaaatgctggtcttcggtcaggataaagccattgaggcgctgactgaagccattaagatggcgcgtgcaggtttaggtcacgaacataaaccggttggttcgttcctgtttgccggccctaccggggtcgggaaaacagaggtgacggtacagctttcgaaagctttgggcattgagcttctgcgctttgatatgtccgagtatatggaacgccataccgtcagccgtcttattggtgcgcctccgggatacgttggttttgatcagggcggtttgctgactgatgcggtcatcaagcatccacatgcggtgctgctgctggacgaaatcgagaaagcgcacccggacgtgttcaatattctgttgcaggtgatggataacggtacgctgaccgataacaacggacgcaaagcagacttccgtaacgtggtgctggtgatgaccaccaacgccggggtacgggaaactgagcgcaaatccattggtcttatccaccaggataacagcaccgatgcgatggaagagatcaagaagatctttacaccggaattccgtaaccgtctcgacaacattatctggtttgatcatctgtcaaccgacgtgatccatcaggtggtggataaattcatcgtcgagttgcaggttcagctggatcagaaaggtgtttctctggaagtgagccaggaagcgcgtaactggctggccgagaaaggttacgaccgggcaatgggcgctcgtccgatggcgcgtgtcatccaggacaacctgaaaaaaccgctcgccaacgaactgctgtttggttcgctggtggacggcggtcaggtcaccgtcgcgctggataaagagaaaaatgagctgacttacggattccagagtgcacaaaagcacaaggcggaagcagcgcattaatctgattgttaggtaggttggtcaagtccgtaatctcgaaagaggttacggactttttgtttatggggtggaggaggttcagaccctttttttaatgatgatggtaagttgttgataattagtgctgcgggaaggtaaggataaaaaagggtgctgcaggagaatgggatggttttgctttattaacaacgggctaaacgtgtagtatttgagttcactgccgtacaggcagcttagaaattcacaggtaacatactccacccgcccaccatgttcactgccgtacagacagataaaatgcgaaaaaaaagctcgcactttcgtacgagctcttctttaaatatggcggtgagggggggattcgaacccccgatacgttgccgtatacacactttccaggcgtgctccttcagccactcggacacctcaccaaattgttttgctaccaaacctcatgggtggcaacggggcgctactatagggagttggagtaaaacggtcaagaagaattttaatgataattattgtttgctcatactgtaaacaagttgtgcagtatatctacatcgagacaagttacggacttatacttccaaagtacttcatacatatcacaaaataaaaaggccggttaaaccgaccttttactcgttctttctcttcgcccatcaggcggtaaaacaatcagcgactacggaagacaatgcggcctttgctcaggtcgtacggggtcagttcaacagtcactttgtcgcccgtcaggatgcggatgtagtttttgcgcattttaccggagatgtgtgcagtaaccacgtgaccgttttctaactctacgcggaacatggtattaggcaacgtttcaagaacggtaccttgcatttcaatattgtcttctttggccatctaatcctctggggtatcactaccgtaatttgaaccggcaagataatgccgaagttctgtaaataagtaaagatttgcgcgctaaatcgcaacaaacaggttcggcacattactccgaaaacacacggctaagccgcaccaaaagcgcaacgtataagggagcggtgagataaacgatgggcgttacctgacgcgaaaaattccttatcggcagcggggtaatgagcgtaaccaactctgcgaccgcaattataacactctggggagaaatgtgccgaaaacattcattcttgtggtgaaaacaagcatcgtggtacccagaaattattcggcaatcgtccgaggcgcatttgattgagataattaaggtaatcccggcggggaatttcgcaggcaccaagcgatgctgtgtgatcgttaaggacctggcagtcgataagcttaccgccatgaccgataaattcctcacagaataccagaagcgccgttttagacgcattttccatccggctgaacatggactcgccacaaaatagcgttccctgggccacgccgtacataccgccgacaagctcatcttcacgccagacttcaatggagtgggcatggccgagttcgtgaaggcgatggtaggcttcgaccacgccacgcgtgatccaggttccttcttcgcgatcgctggcacagccttcaatgacctgaccaaaagcgtaattcatcgtgacacgatagggcgagcgtttatgaaatcgcttcatactacggctgatatgcagtgattctggccatagcaccgcgcggggatcgggcgaccaccagaggatggggtcgcctggagaaaaccacggaaaaataccacgctggtaagccattaacaggcgcgcagggctaagatcgcccccaagtgccagcaggccgttaggctcacgtaatgcgccttccggggaagggaaggctattgaatggcgagaaagctgaaccaggcgcatgaccgcaaaactccacgcaagtcggatcgttcaataatagcttacaaaccctgcttgaactggtaataacgcccctgtctggcaagcagttctgcgtgagtaccttgctcaataatttgcccgttgtccatcactattatttgttggaaacgagagagtccgcgaagtcgatgggtgaccattaacaccgttttctcacgcatcatttctgcaagcaattcaaggatctggctttcggttgtggcatctaagccttcggtaggttcatccagcaacaccagtggcgcatcatgtaacagcgcacgggcgatagccagacggcgcagttcaccaccggagagctggcgtccgccttcacctaaccaactgttgagacctgcatcctcgagcagcttttccaggccaacgcgacgcaagatctccgacagagcctcatcactactgccaggcgaggcgagtaaaagattatcacgcagcgtggcgctaaacagatgcactcgctgaggaacaacgctgatggtctgtcgtagagccgcttcattcaggctggctatggggctatcgttaagcaaaatctcgccctgttgcgggtcccatgcgcgggtcagctgttgtaacagtgttgatttgccgcatccggttcgcccgagaatcgctatatgttccccggcgtttacctgaagagaaatccctttaagtgcctgttgagattgctccggataagtgaactgaacatcccgtaacgtcagcgaaacgcgatcggcaacacgagtttgggtatcaggaaaggtgacctccggtttttgatccgttaagtcagagatacgtacggcagaggcaatgacttgccccagatgctgaaatgcacccgttactggtgccagtgcttcaaacgcggctaacgcgcagaagacaaacagggcaattaacgcgccgggttgagcattgccgccaacgccgccagacgccatccacagcatcaggatcaccgctaacgcgccaatgagcagcattatcgcttgcgacaatgcggtcagttcagattgacggcgttgcgcttccagccattgaatttctgtattctctagttgcgtgcgataacgatcgctggcaccaaaaatggtcagctcagcttgcccttgcagccaggccgtcagttgttggcgatactgtccgcgaagatgagtcagattttgcccggtgctttttcccgcacgataaaacagcggtggcatcaggaaaagcgtcagtaacataatgccgcccagcgtaaaggcgagggtgaaatcaaggaaacttaacccgattgtcaccaccataatcaccacaaaagcgcccaccagcggcgagataacgcgcaggtaaagatgatcgagcgtatcaacatccgccaccacgcgattgagcaattcgccctgacgatagcgcgccagtccggcaggggagaggggcagcaatttgctgaaggtgtaaatgcgcagatgctgcaacacgcggaaagtcgcgtcgtgacttaccagacgttcaaaatagcgcccggcagtacgggtgattgctgcgccacgcacgcccgcagcgggtagcatatagttgaagctgtacagtccggcaacccccgcaaccgctgaggccgagaggaaccagccggaaagtgtcaacagaccgatactggcgagcagcgtcacaattgccagcacaataccaagacttaacatccatttatgacgtttatacagtgccagatagggtagcaaagcgcgcatttaaatctcctcctgacgatgggccagtaatgtggcgaatgggccaccagccacacttaattccgcgtaacgtccttgctcaataatccggccatcctgcataacccaaatgacatcccagtcagcaagatcttctaactggtgggtgaccattaacgttgtctggcgcagagaggcggcattcagcgcctccattacgcgctgttcactgtgagcatcaaggctggcagcgggttcatccaacagtaatagcgaacagggatttagtaacgcacgggccaccgccacgcgctgcgcctgccccacggaaaggcgggcagcctggtcgccaacaggcgtatcaacgccttgtgggaggagcggtagaaactcgctgacccaggcgttatccagcgctgcttgtaattcttgttcgctggcatcaggtcgcgccagtagtacgttatcccgcaatgttgctgccggtaattgtgggttttgcccaacccaggagagatgtttacgccatgattctggtgataaatcgcgtaattctatcccgttgattcgtagcgatccctgatatgagagaaaaccagaaagcgcgttcagcagtgagcttttacctgaaccgctgcgaccaaccaacaccgcacgttggcctgctggcaaagtaaagttcagcggtccggccagcgttttaccttccggcgacgtgataaacagctcctcggcctcaatggtcaccggatcggtcgatgctaattccgcctcaccacgttgcggatgggcgagcggggtttccataaacgttttcagactgtcagctgcgccaacagcctgggctttagcatgataaaacgtaccgagatcgcgtaatggctggaaaaactctggcgcaaggatcagggccagaaaacccgcagccagcgtcacaccggtatcgtagtgaccaaaatccagctcgccgagataggaaaaaccaaagtagaccgccaccagagcaattgacagcgaggtaaaaaattcgagaatgccggaggataaaaacgccagccgtagcacttccattgtccgttggcggaaatcttccgaagcagaacgaatactttcaatttcagcttcaccacgaccaaaaatacgcaatgtttccatgccgcgcaggcgatcgaggaaatgcccacttaagcgagcaagagcgagaaagttacgtcggttagcatcggcagcccccattccaaccagcgccataaacaacggaattaacggtgcagtgcccagcagaatgagcgccgcagcccagttagaggggaagattgccaccacaatcagcaacggcaccgacactgccagcgccatttgcggcagatagcgtgcatagtaatcatgcatatcgtcaatttgctcgagtaccagcgtcgcccagctccccgcaggtttaccctgaatccacgctggccctgcttgttgcagacggtcgagaacctgacggcggatggcaaagcggatatgctgcccggcgtgataacccacccgttcgcgtaaccagaccacccatgcgcgcagtacaaaggtcagaaccagtaacgtaaagggaagcagcagggcttcacggggaatattctccataatcatatgttgcagaattcgcgccatgaaccaggcctgggcaatgatcaatatgccgctcacaaagcccagcagacgagaaatattcagccaacgttgggagatgacgctttgctgttttaaccagcgggttaactctttttgacgagatttattcattgcacgcttagcaggtgagttatcagaattatttgcagagcaatgttacaacggggaaaaaataaaggcgacccatagtcgcatggtgtcgccttctttacttttgttactgatttgtaaaattattttgcgtcagctaaaccatcgaggtagcgttccgcatcaagtgctgccatgcagcctgtaccggccgaagtaatggcctggcgataaatgtgatccatcacgtcgcctgcggcaaagacgccaggaatgctggtctgggtggcattaccatgaatacccgactgtactttgatgtagccgttttccagttccagctgcccttcgaaaatcgcagtattcgggctgtgaccgatagcaacaaacagaccggcaacgtcgagtgactcgatgttatcgctgttttgcgtatcgcgcagacgaacgccagtgacacccatttgatcgccggtcacttcttccagcgtacggttggtgtgcagaatgatgttgccgttctccactttatccatcaggcgcttaatgaggattttttccgcgcggaaaccgtcacggcggtgaatcagatgcacttccgaagcgatgttagacagatacagcgcctcttcaaccgcggtattgccgccgccgatgaccgcaactttctggttgcgatagaagaaaccgtcgcaggttgcacaagcagaaaccccacggcctttaaaggcttcttcagagggcaggccgagatagcgtgcagaagctccggtggcaataatcagcgcgtcgcaagtgtattcgccgttatcgccattcagacggaacggacggttttgcagatccaccttgttgatatgatcaaaaatgatctcagtttcaaacttggtggcatgttcgtgcatgcgctccattaataacggaccggtcagatcgtttggatcgccaggccagttttccacttccgtggtggtggtcagttggccgcctttttccatgccggtaatcagcacaggttgcaggttggcgcgcgccgcgtagacagcagcggtgtatcccgccgggcctgaacccaggataagcagtttactgtgtttggtcgtgcccatgagatccccatagttgttggcagacaatgggcaggattgtagggaatttacagacgtaaaaaaagagtatgacgattttgttaacaatttgtgcaatcggcagcatcgataagcaggtcaaattctcccgtcattatcacctctgctacttaaatttcccgctttataagccgattaaatgatgaataaacgcccctgttaatgaatatctggcatgttgtactaaaaatcgatgttttgctttgacaatcccctggtgttttgcgaaaacattcgaggaagaaaaaaaacagtattcttatatgcgcataaccatgcatgtaaataccatgtttaccgtgctagtgaaatctacgtatggcgtggacagacgccattcgtgatgtcgatagctgccacaaggcaacggtcttctcaccgtagacccaggcattgcgcgccgtgaatcttcatgatttcggtctatcgtgacgggtagcgactctgaacagtgatgtttcagggtcagacaggagtagggaaggaatacagagagacaataataatggtagatagcaagaagcgccctggcaaagatctcgaccgtatcgatcgtaacattcttaatgagttgcaaaaggatgggcgtatttctaacgtcgagctttctaaacgtgtgggactttccccaacgccgtgccttgagcgtgtgcgtcggctggaaagacaagggtttattcagggctatacggcgctgcttaacccccattatctggatgcatcacttctggtattcgttgagattactctgaatcgtggcgcaccggatgtgtttgaacaattcaataccgctgtacaaaaacttgaagaaattcaggagtgtcatttagtatccggtgatttcgactacctgttgaaaacacgcgtgccggatatgtcagcctaccgtaagttgctgggggaaaccctgctgcgtctgcctggcgtcaatgacacacggacatacgttgttatggaagaagtcaagcagagtaatcgtctggttattaagacgcgctaacacggaacaggtgcaaaatcggcgtattttgattacactcctgttaatccatacagcaacagtactggggtaacctggtactgttgtccgttttagcatcgggcaggaaaagcctgtaacctggagagcctttcttgagccaggaatacattgaagacaaagaagtcacattgacaaagttaagtagcggccgccgccttctggaggcgttgctgatccttattgtcctgtttgccgtctggttgatggctgccttactaagctttaacccttcggaccccagctggtcgcaaacggcctggcatgaacctatccataatttaggtgggatgcccggtgcgtggttggcagatacgctgttctttatttttggcgtgatggcttacaccattcccgtcattattgtcggcggttgttggtttgcctggcgtcatcagtccagcgacgaatacattgattattttgccgtttcgctacgcatcattggcgttttggcgctcatccttacctcctgtggtctggcggcaatcaacgctgacgatatctggtattttgcctccggtggcgtcattggcagcttactaagcactacgctacaaccactgctacacagtagcgggggaactattgcgctgctctgcgtttgggcagcgggcctgacgttgttcaccggttggtcatgggtgaccattgctgaaaaactcggcggctggattttaaacattctcaccttcgccagtaatcgtacccgtcgcgatgatacctgggtcgatgaagatgagtatgaagacgacgaagagtatgaagatgaaaatcacggcaaacagcatgaatcacgccgtgcccgtattcttcgcggcgcgctagcgcgtcgtaaacggttggcggaaaaattcattaatccgatggggcggcaaacagacgctgcgttgttctccggtaagcggatggatgatgacgaagagattacctacactgcacgcggtgtggctgccgacccggacgacgtcctattttcgggcaatcgtgcaacgcagccagaatatgacgaatacgatccattattaaacggtgcgccaattaccgaacctgtcgctgtagcagctgctgctaccacggcgacacaaagctgggctgcgccggttgaacctgtgactcagacgccgcctgttgcctctgttgatgttccacctgcgcaacctacagtagcctggcagcctgtaccgggtccacaaacgggagagccggttattgctcctgcaccggaaggttacccacagcagtcacaatatgcgcagcctgcagtgcaatataatgagccgctgcaacaaccagtacagccgcagcagccgtattatgcacctgcagctgaacaacctgcgcaacagccgtattatgcccctgcgccagaacaaccggtggcaggtaacgcctggcaagccgaagagcagcaatccacttttgctccacagtctacataccagactgagcaaacttatcagcagccagccgctcaggagccgttgtaccaacagccgcaacccgttgaacagcagcctgttgtggagcctgaacccgttgtagaagagacaaaacccgcgcgtccgccgctttactactttgaagaagttgaagagaagcgagcccgtgaacgtgaacaacttgcggcctggtatcaaccgattccagaaccggttaaagaaccagaaccgatcaaatcttcgctgaaagcaccttctgttgcagcagtacctccagtagaagccgctgccgctgtttccccgctggcatctggcgtgaaaaaagcgacactggcgacgggggctgccgcaaccgttgccgcgccagtcttcagtctggcaaatagcggtggaccgcgtcctcaggtcaaagaggggattggtccgcagttgccacgaccgaaacgtatccgcgtgccaactcgtcgtgaactggcgtcttacggtattaagctgccctcacagcgtgcggcggaagaaaaagcccgtgaagcccagcgcaatcagtacgattctggcgatcagtacaacgatgatgaaatcgatgcgatgcagcaggatgaactggcacgtcagttcgcccagacacagcagcaacgctatggcgaacagtatcaacatgatgtgcccgtaaacgcagaagatgcagatgctgcggcagaggctgaactggctcgtcagtttgcgcaaactcaacaacaacgttattccggcgaacaaccggctggggcgaatccgttctcgctggatgattttgaattttcgccaatgaaagcgttgctggatgatggtccacacgaaccgttgtttacgccaattgttgaacctgtacagcagccgcaacaaccggttgcaccgcagcagcaatatcagcagccgcaacaaccagttccgccgcagccgcagtatcagcagccacaacagccggttgcgccgcagccacaatatcagcagccgcaacaaccggttgcgccacagcagcaatatcagcagccgcaacaaccggttgcgccgcagcagcagtatcagcagccacaacagccagttgcgccacaaccgcaggataccctgcttcatccgctgttgatgcgtaatggcgacagccgtccgttgcataaaccgacgacgccgctgccttctctggatttgctgacaccgccgccgagcgaagtggagccggtagatacctttgcgcttgaacaaatggctcgcctggtggaagcgcgtctggctgatttccgtattaaagccgatgtcgtcaattactctccggggccggttatcactcgctttgaattgaacctggcaccgggcgtaaaagcggcgcgcatttctaacttgtcacgggaccttgcccgttcactttcgacggtggcggtgcgtgtcgttgaagttattcctggcaaaccctatgtaggtctggagttaccgaataaaaaacgacaaaccgtttatctgcgcgaagttttggataacgccaaattccgcgataatccgtcgccattaaccgtggtgctgggtaaagatatcgccggtgagccggtggttgccgatctggcgaaaatgccgcacttgttggttgcggggactaccggttccggtaaatctgtcggtgtgaacgcgatgatcctgagcatgctttataaagcacagccagaagatgtgcgtttcatcatgatcgacccgaaaatgctggagctttcggtttatgaaggcattccgcatctgttaacggaagtcgttactgatatgaaagatgccgccaacgcgctgcgctggtgtgttaacgagatggagcgtcggtataaactgatgtctgcgctgggtgtgcgtaatctggcgggttataacgaaaaaattgctgaagccgatcgcatgatgcgtccgattccagacccgtactggaagccgggtgacagtatggatgcccagcatccggtgctgaaaaaagaaccatacattgtggtgttggttgacgaatttgccgacctgatgatgacggtaggtaaaaaagtggaagagctgatagcacgtctggcgcaaaaagcccgtgccgcgggtatccacctcgtactggcaactcagcgtccatcggttgatgttattactggtctgattaaagcgaatattccgacccgtatcgcctttaccgtatccagtaagattgactcacgtaccattcttgatcaggctggcgcggaatcactgctgggtatgggggatatgctctactctgggccgaactccacgttgccggtacgtgtccatggtgcttttgttcgcgatcaggaagttcatgccgtggtgcaggactggaaagcgcgtggtcgcccacagtatgttgatggcatcacctccgacagcgaaagcgaaggtggtgcgggtggtttcgatggcgctgaagaactggatccgttgttcgatcaggcggtgcagtttgtcactgaaaaacgcaaagcgtcaatttctggcgtacagcgtcagttccgcattggttataaccgtgcagcgcgtattatcgaacagatggaagcgcaggggattgtcagcgaacaggggcacaacggtaatcgtgaagtgctggccccaccgccgtttgactaactaatgcatcgtatgccggataaggcgcggtagcgtcgcatccggcactctatcaactgaaaattcagtattttcttctttcctcaagctgattattagcctggaatagagagtagagggaactcccgatcgggagtgacgtaatttgaggaataatgatgaaaaaaattgccatcacctgtgcattactctcaagcttagtagcaagcagcgtttgggctgatgccgcaagcgatctgaaaagccgcctggataaagtcagcagcttccacgccagcttcacacaaaaagtgactgacggtagcggcgcggcggtgcaggaaggtcagggcgatctgtgggtgaaacgtccaaacttattcaactggcatatgacacaacctgatgaaagcattctggtttctgacggtaaaacactgtggttctataacccgttcgttgagcaagctacggcaacctggctgaaagatgccaccggtaatacgccgtttatgctgattgcccgcaaccagtccagcgactggcagcagtacaatatcaaacagaatggcgatgactttgtcctgacgccgaaagccagcaatggcaatctgaagcagttcaccattaacgtgggacgtgatggcacaatccatcagtttagcgcggtggagcaggacgatcagcgcagcagttatcaactgaaatcccagcaaaatggggctgtggatgcagcgaaatttaccttcaccccgccgcaaggcgtcacggtagatgatcaacgtaagtagaggcacctgagtgagcaatctgtcgctcgatttttcggataatacttttcaacctctggccgcgcgtatgcggccagaaaatttagcacagtatatcggccagcaacatttgctggctgcggggaagccgttgccgcgcgctatcgaagccgggcatttacattctatgatcctctgggggccgccgggtaccggcaaaacaactctcgctgaagtgattgcccgctatgcgaacgctgatgtggaacgtatttctgccgtcacctctggcgtgaaagagattcgcgaggcgatcgagcgcgcccggcaaaaccgcaatgcaggtcgccgcactattctttttgttgacgaagttcaccgtttcaacaaaagccagcaggatgcatttctgccacatattgaagacggcaccatcacttttattggcgcaaccactgaaaacccgtcgtttgagcttaattcggcactgctttcccgtgcccgtgtctatctgttgaaatccctgagtacagaggatattgagcaagtactaactcaggcgatggaagacaaaacccgtggctatggtggtcaggatattgttctgccagatgaaacacgacgcgccattgctgaactggtgaatggcgacgcgcgccgggcgttaaatacgctggaaatgatggcggatatggccgaagtcgatgatagcggtaagcgggtcctgaagcctgaattactgaccgaaatcgccggtgaacgtagcgcccgctttgataacaaaggcgatcgcttttacgatctgatttccgcactgcataagtcggtacgtggtagcgcacccgatgcggcgctgtactggtatgcgcgaattattaccgctggtggcgatccgttatatgtcgcgcgtcgctgtctggcgattgcgtctgaagacgtcggtaatgccgatccacgggcgatgcaggtggcaattgcggcctgggattgctttactcgcgttggcccggcggaaggtgaacgcgccattgctcaggcgattgtttacctggcctgcgcgccaaaaagcaacgctgtctacactgcgtttaaagccgcgctggccgatgctcgcgaacgcccggattatgacgtgccggttcatttgcgtaatgcgccgacgaaattaatgaaggaaatgggctacgggcaggaatatcgttacgctcatgatgaagcaaacgcttatgctgccggtgaggtttacttcccgccggaaatagcacaaacacgctattatttcccgacaaacaggggccttgaaggcaagattggcgaaaagctcgcctggctggctgaacaggatcaaaatagccccataaaacgctaccgttaatgttatcgttgcggtaatgttgttactgtatccctgtggtcgcaggctgtggccacatctcccatttaattcgataagcacaggataagcatgctcgatcccaatctgctgcgtaatgagccagacgcagtcgctgaaaaactggcacgccggggctttaagctggatgtagataagctgggcgctcttgaagagcgtcgtaaagtattgcaggtcaaaacggaaaacctgcaagcggagcgtaactcccgatcgaaatccattggccaggcgaaagcgcgcggggaagatatcgagcctttacgtctggaagtgaacaaactgggcgaagagctggatgcagcaaaagccgagctggatgctttacaggctgaaattcgcgatatcgcgctgaccatccctaacctgcctgcagatgaagtgccggtaggtaaagacgaaaatgacaacgttgaagtcagccgctggggtaccccgcgtgagtttgactttgaagttcgtgaccacgtgacgctgggtgaaatgcactctggcctcgactttgcagctgcagttaagctgactggttcccgctttgtggtaatgaaagggcagattgctcgcatgcaccgcgcactgtcgcagtttatgctggatctgcataccgaacagcatggctacagtgagaactatgttccgtacctggttaaccaggacacgctgtacggtacgggtcaactgccgaaatttgctggcgatctgttccatactcgtccgctggaagaagaagcagacaccagtaactatgcgctgatcccaacggcagaagttccgctgactaacctggtgcgcggtgaaatcatcgatgaagatgatctgccaattaagatgaccgcccacaccccatgcttccgttctgaagccggttcatatggtcgtgacacccgtggtctgatccgtatgcaccagttcgacaaagttgaaatggtgcagatcgtgcgcccagaagactcaatggcggcgctggaagagatgactggtcatgcagaaaaagtcctgcagttgctgggcctgccgtaccgtaaaatcatcctttgcactggcgacatgggctttggcgcttgcaaaacttacgacctggaagtatggatcccggcacagaacacctaccgtgagatctcttcctgctccaacgtttgggatttccaggcacgtcgtatgcaggcacgttgccgcagcaagtcggacaagaaaacccgtctggttcataccctgaacggttctggtctggctgttggtcgtacgctggttgcagtaatggaaaactatcagcaggctgatggtcgtattgaagtaccagaagttctgcgtccgtatatgaacggactggaatatattggctaatacccaatttttctgaatctaaaaagcgcctgcgggcgctttttttgtctccctttgataccgaacaataattactcctcacttacacgtaatactactttcgagtgaaaatctacctatctctttgattttcaaattattcgatgtatacaagcctatatagcgaactgctatagaaataattacacaatacggtttgttactggaatcaatcgtgagcaagcttgagtgagccattatgaaaacgaaaatccctgatgcggtattggctgctgaggtgagtcgccgtggtttggtaaaaacgacagcgatcggcggcctggcaatggccagcagcgcattaacattaccttttagtcggattgcgcacgctgtcgatagcgccattccaacaaaatcagacgaaaaggttatctggagcgcctgtacagttaactgtggtagtcgctgcccgctacgtatgcacgtcgtggacggtgaaatcaaatatgtcgaaacggacaataccggcgatgacaattacgacggcctgcaccaggttcgcgcctgcctgcgtgggcgttccatgcgtcgccgtgtctacaatccggaccgcctgaaatatccgatgaaacgagtcggggcgcgcggtgaaggcaaattcgagcgcattagctgggaagaagcctacgacatcatcgcgaccaatatgcagcgcctgatcaaagagtacggcaacgagtctatctatctgaactatggcaccggtacgctgggcggcaccatgacccgctcctggccgccgggaaataccctggtcgcgcggctgatgaactgctgcggcggctatctgaaccattacggcgactactcctccgcgcaaattgcggaaggtttgaactatacctacggcggctgggcagatggcaacagcccgtcggatatcgaaaacagtaagctggtagtgctgtttggtaataaccctggcgaaacgcgaatgagtggcggtggggtgacttactatcttgaacaggcacgccagaaatctaatgcccgcatgatcatcatcgatccgcgctataccgacaccggtgccgggcgcgaagatgagtggatccctattcgtccgggaacagatgccgcactggttaacggtctggcgtacgtcatgatcactgaaaacctggtggatcaggcattcctcgataaatattgcgttggctacgatgagaaaaccctgccagccagtgcgccgaaaaatggccactataaagcttatattctgggtgaagggccagatggcgtggctaaaacgccggaatgggcctcgcaaatcactggtgttccggcagacaaaatcatcaaattggctcgtgaaatcggtagtaccaaaccggcgtttatcagccagggatggggcccgcagcgtcacgctaacggtgaaatcgcaacccgtgctatctcgatgctggcgattctgaccggtaacgttggtattaacggaggcaacagcggcgcgcgtgaaggttcatacagcttaccgtttgtccgtatgccgaccttggaaaacccgatccagaccagcatttcgatgtttatgtggaccgatgccattgaacgtggcccggaaatgacggcgctgcgtgatggtgtacgcgggaaagataagctggatgtgccgatcaaaatgatctggaactatgccggtaactgcctgattaaccagcattctgaaatcaaccgtacccatgaaatccttcaggatgataagaagtgcgagctgattgtggttatcgactgccacatgacctcatcggcgaaatatgctgacatcctgctgcctgactgcaccgcttccgaacagatggactttgcgctggatgcatcctgcgggaatatgtcttacgtgattttcaacgatcaggtgattaaaccgcgctttgaatgtaagaccatctatgaaatgaccagcgaactggcaaaacgtcttggcgttgagcaacagtttactgaaggccgtacccaggaagagtggatgcggcatctgtatgcccagtcgcgggaagcgattcctgaactgccaacgtttgaagagttccgcaagcaggggatctttaaaaagcgcgacccacaagggcatcacgttgcttataaagccttccgtgaagatccgcaggcaaacccactgactacgccatcgggcaaaattgagatttattcgcaggcgctggctgacattgccgctacctgggaattgcctgaaggcgatgtgatcgatccactgccgatctacacgccgggctttgaaagttatcaggatccgctgaacaaacagtatccgctgcagcttacaggtttccactataaatctcgcgttcactcaacttacggcaacgttgatgtgctgaaagcggcttgccgtcaggaaatgtggatcaacccgcttgatgcccaaaaacgcggtatccacaacggcgataaagtcaggatctttaacgatcgtggtgaggttcatattgaggcgaaagtgacgccacgaatgatgccgggtgtggtcgcactgggtgaaggtgcctggtatgacccggatgcaaaacgtgtcgataagggtggttgtattaacgtactgaccactcaacgtccgtctcctctcgctaaggggaatccgtcacatacaaaccttgttcaggttgaaaaggtgtaaggagtaaccgatgacaacccagtatggattttttattgattccagccgttgcaccggttgcaaaacctgcgagctggcctgtaaagactacaaagatttgacgccagaagtcagcttccgccgcatttatgaatatgctggcggcgactggcaggaagataacggtgtctggcaccagaacgtgtttgcctactatctgtcgatttcatgtaaccactgcgaagatccggcttgtactaaagtctgcccgagcggtgcgatgcataaacgtgaagatggttttgttgtggtcgatgaagatgtgtgcattggctgccgctactgccatatggcttgcccgtatggcgcaccgcaatataacgaaacgaaaggccatatgaccaaatgcgatggttgttatgaccgtgttgcggagggtaaaaagccgatctgtgttgaatcttgtccgctgcgggcgctggatttcggccctatcgacgagctgcgtaaaaaacatggcgatctggcggccgttgcgccgttgccgcgagctcactttaccaaaccgaatattgtgatcaaacccaatgccaatagccgcccgaccggggataccactggctatctggcaaacccgaaggaggtgtgagatgggaagtggatggcatgaatggccgctgatgatcttcacggtcttcgggcaatgtgtagcaggtggttttatcgttctggctttggcgctgctcaaaggcgacctgcgagcagaagcccagcagcgtgttatcgcctgcatgtttggtttatgggtgctgatgggcattggctttatcgcctctatgctccatcttggttcaccaatgcgcgcttttaactcgctcaaccgggtaggggcttcagcactcagtaacgaaatcgccagcggttcgatcttttttgccgtaggcggcatcggctggttgctggcaatgctgaaaaagctgtcaccggcattgcgtacgctgtggctgatagtgacgatggttcttggcgtcatctttgtctggatgatggtgcgtgtgtataacagcattgataccgttccgacctggtacagcatctggacgccgatgggcttcttcctgacgatgtttatgggcggcccgttactgggttacctgttgttgagtctggctggcgtcgatggctgggcgatgcgtctgctgccagcaatttctgtactggcactggtagtgagtggcgtggtgtcagtgatgcagggcgcagagctggcgactattcatagttctgtgcagcaggccgcagcgctggtgccggactatggtgcgctgatgtcctggcggatcgtgcttttggccgttgccctgtgcttgtggattgcaccacagctaaaaggttatcagcctgcggttccgctactttctgtatcattcattctgcttctggcaggggaattaatcggtcgcggcgtattctatggtttgcatatgaccgtggggatggccgtcgcaagctaatcataacaaccggggtttcggccccggttctcttttatttctgcttcgttaacgtgtcataactggtcatcaaattacgataatcaggaatgtggttagagaacaacgtcgccagtccttcaatatcattacgccagtcgcgatgcagctcgcacgccacgccgaaccatgtcatcaattgcgcaccagcttgcgacaagcgatcccatgccgaatgccgggtaatttcattaaaggtccctgacgcgtcagtcacgacaaagacgtcaaacccttcttcaatggctgaaagcgccgggaatgccacgcaaacttcggttaccacaccggcaataattaactgttttttacctgtcgctttgacagcttttacaaaatcttcgttatcccaggcgttaatatttcccgggcgagcaatgtaaggtgtatcggggaattgtgctttcagttctggaactaatgggccgttaggaccggtttcaaaactggtggtaagaatagttggtaagttgaaatacttagccaggtcacccagcgccagcacgttatttttaaacttatcgggttcgatatcccgtacaagggaaagtaaaccagcctggtgatcaacaagcaaaacggcagcatcatttttatcaagacgaacatacggtttggtcatcctcttctcctttcgagagtcagtggtacgtctgaaatcgatcagacgcgatgcattgctctgaaagcatagacgggaaatatgagtttgctgtgaccatgaaatttttcgactgaacgaagcgtatgaaatttgtgttagttcaataaaaacaatcagatgagactaatcatctcttcagcattagcgttatgaatgagtaatataaatcgataataccgccgctgggatatcgcgtattttcacccattgacaatgtttttggcggtggcatgatgcgcatgaaatttgaacttcctcacggttttaattcatgtccacgtatacccagcctgtcatgcttttgctgtctggcctgcttttgttgactctggcgattgcggtgttaaatacactcgtgccgctttggctcgcccaggaacacatgtccacatggcaggtaggcgttgtcagctcatcctattttaccggcaaccttgtcggtacattgctgacagggtatgtcattaagcgcattggctttaaccgcagctattatctggcctccttcatttttgccgctggctgtgccggccttggcctgatgattggattctggagctggttggcttggcgttttgtcgcgggcgtcggctgtgccatgatttgggtggttgttgagagcgcgctgatgtgcagtgggacgtcacgtaaccgtgggcgtttgcttgctgcgtatatgatggtttattacgtgggaacgtttttaggccagttactggtcagcaaagtttcaaccgagctgatgtccgtattgccgtgggttacaggtttgacgttggcagggatcttaccgctgttgtttacgcgtgtgctgaatcagcaggctgaaaaccatgattcgacgtcaattacgtcaatgctaaaactccgtcaggcgcggcttggcgtgaatggctgcattatctcaggaatcgttctgggatctctatatggcctgatgccgctgtacctcaatcacaaaggggtgagcaatgccagcattggtttctggatggcggtactggtcagtgcgggtatccttggacaatggccgattggacgtctggcggataagtttggtcgactgctggtgttgcgtgttcaggtctttgtcgtcattctcggcagtatcgcgatgcttagccaggcggcgatggccccagcgttattcatcctcggtgccgctggctttacgctatatccggtggcgatggcatgggcttgcgagaaagttgaacatcatcaactggtggcgatgaaccaggccttactgttgagctatactgtgggaagtctgcttggcccgtcatttaccgctatgctaatgcagaatttctccgataatttattgtttatcatgatcgccagcgtatcgtttatctatttgctgatgctgctgcgcaacgccggtcatacgccgaaacccgttgctcacgtgtaaatgaattcaagcagagtgtgaacttactgtttcacactctgcttttttgtttcttctatctgacttgctttattccaaattttattcgtttaaaaataaaatgtgcagcaggttataattttgcatttcgctatttccgcacttcttatttgccgcgcataatccctcgttttaccgatgcccctttaattttggcgaaggatttgtctatggctgggaatgttcaggaaaaacagttgcgatggtacaacattgcgctgatgtcttttatcactgtctggggttttggcaacgttgttaataactatgccaaccaggggctggtggttgttttttcatgggtgtttatctttgcactctatttcacaccttatgcgctaattgttggtcagttaggctcgaccttcaaagatgggaagggcggggtcagtacctggattaaacacacgatgggacccggactggcttatctcgccgcgtggacctactgggtggtgcatattccctatctggcacaaaaaccccaggcaattctgattgcgctcggttgggcgatgaaaggcgacggttcgctaatcaaagaatattcagtcgtagcgttacaggggttaacgctggtgctgtttatcttctttatgtgggttgcttcacgcggtatgaaatcgctgaaaatcgtcggttctgtggcagggattgctatgtttgttatgtcactcctgtatgtggcgatggcggtaaccgcgcctgcaattactgaagtgcatattgcgaccacaaacattacctgggaaacgttcattcctcatatcgactttacctacattaccactatttcaatgctggttttcgcggttggcggagcagagaagatttctccttacgttaatcaaacgcgcaacccaggaaaagaatttccaaaagggatgttatgcctggcggtgatggttgcggtttgtgccattctgggctcgctggcgatggggatgatgtttgattcgcgtaatatcccggatgacttaatgaccaacggtcagtattacgcctttcagaagctgggcgagtattacaacatgggtaatactttaatggtgatttacgccattgcgaataccctgggacaagtagcggcgctggtattctcgattgatgccccgcttaaagtgctattaggtgatgctgacagcaaatatattccagccagtttatgtcgtaccaacgcttctggtacgcccgttaatggctattttctgaccctggtactggtggcgattctgattatgctgccgactctcggcattggtgatatgaacaatctctataaatggctgttgaaccttaattcggtagtgatgccgctgcgttatttatgggtatttgttgcatttattgcagtcgttcgcttggcgcagaaatataaaccagaatatgtctttattcgtaataagcctctggcaatgaccgtcgggatttggtgttttgcctttaccgcctttgcctgtttgacggggatcttcccgaaaatggaagccttcactgcagagtggaccttccagttggcgctgaatgttgcaacgccgtttgtgctggtaggattaggactgatattcccgctgctggcgcgtaaagcgaatagtaaataattattgtggtcggtgacgctgactctggcagatctgacccgtttttacataatcgagaaatgcgcgcaagccgcaggacatatactggcggtttggataatagatctggaagcctggacgctctgtgctccagtcttccagtacacattctaaacgaccagtatcaaggtactccttgatctgttcatagagcagatacccgataccagcacccatcaaaacggcctccagttcagcatcaacatcatccagaatgatatttcctgcgacagcaatttccagctcctttgcaaattgccagtggaaaggtttgccgctgggataacgaaaaacaacacattgatgattaagcagatcatgaggatggcggggtttgccatatcttgcaaagtactctggcgttgctgctacacataatttcactggcgggccgatcgccacgctgatcatatctttttcgacgatgcaactaagtcgaacgccagcgtcaaagccctgttggacgatatcgacaagagagtcgtcagttgtgagctcgactttaatatcaggatattcacgtgtgaaaccaaccagtaaagacattaaaaatatacgtgcagctacccgggcggcattgattttgagcgttcctgtcggtgtcagacgaaaatcattcatctcatctaacatgatctgaatttcgtcgaaagctgggcgcaatcgttcatagagattagaacccgcttccgttaacgatacgcttcgggttgtccgattgaataagcgaattttaagacgttgttccagtgttttaatactatggctaatggcggacgaggataagcctaactcatcgcccgctgcacgaaagctttgattacgggccacggcaaagaaagtggcaaagtcagacatattcatccgcattagtgaaaatccttcattaactcatcctgaatcatcacgtttacaggattatgccgcctgcgtaaagtgcgctccagaacttaacgtggaggtaaaattatgcagtctgaacgtatttatttggtatgggcccatcctcgtcatgattcattgaccgcacatattgctgatgcgatccatcagcgggcaatggagcggaaaatacaggtgacggaactcgatttatatcggcgtaatttcaacccagtgatgacgccggaagatgaaccagactggaagaatatggataaacgttattctccagaggttcatcagctttattcagagctgcttgaacatgacacgttagtggtggtttttcctctctggtggtacagcttcccggcaatgctaaaaggatatattgacagagtatggaataatgggctggcttatggagatgggcacaaattaccattcaataaagttcgttgggtggcgctggttggaggagacaaagaatcatttgtccagatgggctgggaaaaaaatataagcgattatttaaaaaatatgtgcagttatcttggtattgaagatgccgatgtcactttcttgtgtaatacagtggtattcgatggggaagaacttcacgcgagctattatcagtcgttattatctcaggtacgggatatggtagatgcactataagatgtgttaaaaacgctgtagcagaatgaagcgcggaataaaaaagcggcaactcaataaagttgccgctttacggggaaattagaacattaccttatgaccgtactgctcaagaatgcctttcacgcgttccatggtctctttcttcggtggtttaacaccgtcgagtttgtactcttcacccattgccacccatttgtgtttgcccagctcgtggtaggggagaagctcgattttctcaacgttgcccatatcacgggtaaattcaccgaggcgatgcgctgaatcgtcatcgtcagaccagcctgggacaacaacgtagcggatccacaccttcacatttttgttcgccagatatttagcgaactccagcgtgcggtggttggaaactccaaccagattttggtggatctcgtcgttcatctgtttgagatcgagcattaccaggtcggttacttccagcagttcatcaatcaccggatcgtaacgacgaacaaaaccgttggtgtccagacaggtatgaatgccttcttttttgcaggcgcggaaccagtcacgaacaaactcagcttgcaggattgcttcaccgccggatgcggtaacgccgccgccggaagcgttcataaagtggcgataggtcaccacttccttcatcaaatcttcaacggtaacttctttaccgccatgcgtgtcccaggtgtcgcggttatgacaatacaggcagcgcatcaggcagccctggaaaaaggtgataaagcgaatacctgggccgtctacggttccacaggattcaaaggagtgaatgcgaccaataactgacattgcggtgtttctccagatgtggcccatctgaggccgtgttggtgcgcagctcgaaggctacgtcgagtctgttttggcagtcaccttaaagtatagatagctgacaaaaaaggctctcgcgctaaaaaaggccccactttcgtggagcctttattgtacgctttttactgtacgatttcagtcaaatctaattacatagattgagtgaaggtacgagtaataacgtcctgctgctgttctttagtcagcgagttgaaacgtactgcgtagccagatacacggatggtcagctgcggatatttttccgggttttccatcgcgtcgagcagcatttcacggttcatcacgttaacgttcaggtgctgaccaccttcgatggatgcttcgtggtggaagtaaccatccatcagaccagccaggttggtcttacgaacttcgtcgtctttacccagtgcgttcggaacgatagagaaggtgtaggagataccatctttagcgtaagcaaacggcagtttagcaacggaagtcagagaggctactgcacctttctggtcacgaccgtgcatcgggttagcacccggtccgaacggcgcgccagcacgacgaccgtctggggtgttacccgttttcttaccatacacaacgttagaagtgatggtcagaacagactgagtcgggatagcgtcacggtaggtgtgcagtttctgaattttcttcatgaaacgttctaccaggtcaacagccaggtcatctacacgcggatcattgttaccaaactgcgggtattcgccttcgatttcgaagtcgatagccagaccgtcttcgtcacgaatcggtttaactttcgcatatttgattgcagacagggagtcagcagcaacggacagaccagcgataccacacgccatggtgcggataacgtcacggtcgtgcagcgccatcagagaggcttcgtagctgtacttgtcgtgcatgtagtggatgatgttcagtgcagtgatgtactgtttagccagccagtccatgaagtgatccatgcgctccatcacttcatcatagttcaggacatcgcctttgatcggttcagacttcggaccaacctgcattttcagtttttcgtcaacgccgccgttgattgcgtacagcatggttttcgccaggtttgcacgcgcaccgaagaactgcatttgtttaccaacgatcatcgggcttacgcagcaagcaatagcgtagtcatcgttgttgaagtccggacgcatcaggtcatcgttctcatactgcagagaagaggtgtcgatggacactttagcggcgaatttcttgaagttcagcggcagtttttcagaccacagaatggtcatgttcggttccggagacggacccatggtgtacagggtgttcaggaaacggaagctgtttttggtaaccagggtacgaccgtcgaggcccataccaccgatagattcggttgcccagatcgggtcgccagagaacagttcatcgtattccggagtacgcaggaagcgaaccatacgcagtttcatgaccaggtggtcaaccatttcctgcgcttcttgttcggtgatcttgccagctttcaggtcacgttcgatgtacacatccaggaaggtggaggtacgaccgaaggacattgcagcaccgttctgagacttaacagcagccaggtagccgaagtaagtccactggatagcttcctgagcgttggtagccggaccagagatgtcgtagccgtatttcgcagccatttctttcatctgacccagagcgcggtgctgttcagcgatttcttcgcgcagacggatagtctgttccaggtttacgccgttttccagatcagcctgcagagaagtgaactgtgccagtttgtctttcatcaggtagtcgataccgtacagcgcaacgcgacggtagtcaccgatgatacggccacggccatatgcatctggcagaccggtcagaacaccagatttacggcaacgcaggatgtccggagtgtaaacgtcgaacacgccctggttgtgagttttacggtattcagtgaagatttttttgatcatcggatccagttcgcggttgtacgctttgcaggaaccttcgatcattttgataccaccgaacgggataagagcacgtttcagcggagcttcagtctgcagaccaacgattttctcaagctgcttgttgatgtagccagcgtcgtgagaggtgatggtggaagcaacagcggtgtcaaagtcaactggcgcgtgagtgcggttttccagtttaacgccttccattactttgtcccacagggtggtggtcgcttcagtagcgccagccaggaaggactcgtcaccctcgtacggagtgtagtttttctgaatgaagtcacggacgtttacttcattctgccagtcacctttggtaaaaccttcccaggctgtggctaacttttcattaagctcggacatgtaacacctaccttcttaagtggattttttatttactgcgtacttcgacaaccattaatggtggtcgttttcacgcaggtaaatgacccagtatgtcaacccaaccaacaaaccaccaccgataatgttgccgatcgtaaccggaatcaggttatcagtgatgaaattcatcacggtcaggtgagaaaaattttccggtgcagaaccgactgcggtccaaaattccggggatgcgaagtcgcggattacaatacccatcgggatcataaacatgtttgcgatactgtgctcaaaaccgctggcaacaaacatcgcgaccggcagcaccataatgaacgctttgtccatcaggctgcggccagaataactcatccatactgccagacataccatcaggtttgccaggataccaagacagacggcctcaataaaagtatggtgcactttgtggtcggcggtttgtaggacgtttagtccccattgaccatttgcggtcatatactcgccggaaagccacattaaaagtacaaacagcagtgcgccgaccaggttgccaaaatagacatttagccagtttttcgccaactgaccccaggtgatgcgcccactcgccttagcaacaacaatcaacacggtggaagtaaagagatcggctccgcagacaacacaaagaatcagccccagagagaagcaaatgccgccaaccagttttgccatgccgaagggcattgtgcctgtgccagtggttgctgtgatatagaagacgaatgcgattgagatgaaaacaccggcggtaatcgccagatagaaagtcttaagcggatgtttcgttgctttatagacacccgcctcttcggccactttggccattgcagcaggaagtaaaagatcaaaagggttgtcagctttcacactaactctctctttattaagtcggcgacgagatactaacaaagcattatagatgagaaattgatatagatcatatctcgcctggcttataggcccgtaactcgcatggtttttatgcaaatacggagtaaatatttgattatccaaataaaaataaattttaaaaattaacaaatgagttgaattttttccgcatcctccgctaaaacagttaattaaaagggagcatcaggcgaataaagtaacaatatcgatcgtatttattaaatacaaattaccgatatttaaccttataattacaattattttattaatgcaaatatatgtaaagcggggcattaaaaaaacgccccgtaatataactcagactaatcattaagcctacattgcgtaggctatttgattttattttgcccagaatgctgctttggcgcgctgcagcttttcgtaggccttcaacaacgactgatgtgcagcaaacgcgtgcagatcgctatctaccggttgcaggccgtaaaacgccgcttcgccgctcattgccgcactggcggcttctacggcatctgcgccgtacatgcgaacaaacgcattcagatattgcagcggctggcgatcttcttcctgtgccagtaataacaacgtttgcaggcagcgataatagttggcgcgttccggactaaatactgatgagttaaactccatcgtccattcggtccagaccagagcctgttccagatcgccaccagccagcgccagcatggcttttaattcaccgatacgcagggtgtaccaaccgttatccgacccggtcgccagacccaacagctcacgcacgcgggtaaagtcatcaaaaccttcttcatccagttgctcgatgaggttcaggtaatcttctttttcccactcgctgcctggtagcgaaagaatcgtttcacgtaaatggctgcccatactgttattcgcgagccacagatcttcagccggataaatatcggacatgccaggcacgataatacggcaagcataaacgcccagatgctcgtaatcggcaatataaacttctttatcttctttgttgaagatagccatcagtgtggcgaactcttcttccgtggtgccggagaaattccagtccacaaacggataatcggcatcctgcttgaacaggtcccaggagattaaaccgctggaatcgataaagtgcgtttcgaggttggtatgttcagcgacttcttcatcatcgaaggttggcggagtaaacacatccaaatctttcaggccacgaccttgcagcagctcggtcacggtacgttccagtgctacgccaaaatcaggatgcgcaccgaaagaggcaaagcaggtaccgttagcaggattgaacagtaccacgcaaatcaccggatactggccgccaagcgaaccgtcataagcgaagattgggaaaccctccgcttccagcgtttcgatggcttcaactactgctgggtaacgcgccagcacgtctgccgggatctctggcaggctgatgctttcagcaataatgcggtttttcacgtagcgttcgaaaacttcagacaatccctgaacgcgtgcttcgttgcgggtattacctgcggacataccgttggagacgtacaggttaccaatgatattcatcggaatataaacggtctgattgtcggactgacgcgtaaacggcaggccgcaaataccacgatcttcgttaccggattgtaggtcaatcagcatgctgccggtcagttcattctccggatcataaaacgcgcgcagacggtcatcgagcagcccttctggcacatcgtcattttcggtcagtgggaaccatttttcgttgggataatgcacgaacggaccgttggcgatggtttcgcccagccagaagtccgcaaaaaagtagttggttgagagacgctcgaaatattcaccgagtgcagaagccagcgccgctttcttggttgcgcctttaccgttggtaaaacacagtgcgcactctttgtcgcgaatatgtacagaccagacgttaggcacgggattcagccaggaggcctcttcaatctgaaagccgaggtctgaaagtttttgctggaagcgagcgatggaatcttccagagcggcatctttgccggggataaatgtttgcgtcatgaaaatcactttagtcgtacggaaagcgcgcaataatacgggttttatctcaaaggcgctatcaccgccgccatgccgatgaactgttgactatgcttttagcggataaaccacgttaagagcataaaaatgaaggcgttcgatctccaccgtatggcatttgataaagtgccttttgatttccttggcgaagttgcactacgtagtctttatacctttgtactggtctttttgttcctcaaaatgaccggaagacgcggtgtgcggcagatgtcgctgtttgaagttttaatcattctgacgctgggatcagcggcgggagatgtggcgttttatgatgatgtgccgatggtcccggtacttatcgtctttattactctggcgttgttataccgcctggtaatgtggttgatggcgcacagtgaaaaactggaagatcttctggaaggcaagccagttgtcattattgaagatggcgagctggcctggtcgaaactcaataactccaacatgacggaatttgagttctttatggagctacgattgcgtggcgtggagcagctggggcaggtacgtctggcgattctcgaaaccaacgggcaaatcagtgtctatttctttgaagatgacaaggtgaaaccgggtttacttattttacccagtgattgtacgcagcgttacaaagtggtgccggagtcggcggactatgcctgtattcgttgtagtgaaatcattcatatgaaagcgggggaaaaacaattatgtccgcgctgtgcaaatccagaatggacgaaggcaagtcgggcaaaacgggtgacctgacagtaaaaacatcggctttttgctaataatccgagagattcttttgtgtgatgcaagccacatttttgccctcaacggttttactcattgcgatgtgtgtcactgaatgataaaaccgatagccacaggaataatgtattacctgtggtcgcaatcgattgaccgcgggttaatagcaacgcaacgtggtgaggggaaatggctcaaatcttcaattttagttctggtccggcaatgctaccggcagaggtgcttaaacaggctcaacaggaactgcgcgactggaacggtcttggtacgtcggtgatggaagtgagtcaccgtggcaaagagttcattcaggttgcagaggaagccgagaaggattttcgcgatcttcttaatgtcccctccaactacaaggtattattctgccatggcggtggtcgcggtcagtttgctgcggtaccgctgaatattctcggtgataaaaccaccgcagattatgttgatgccggttactgggcggcaagtgccattaaagaagcgaaaaaatactgcacgcctaatgtctttgacgccaaagtgactgttgatggtctgcgcgcggttaagccaatgcgtgaatggcaactctctgataatgctgcttatatgcattattgcccgaatgaaaccatcgatggtatcgccatcgacgaaacgccagacttcggcgcagatgtggtggtcgccgctgacttctcttcaaccattctttcccgtccgattgacgtcagccgttatggtgtaatttacgctggcgcgcagaaaaatatcggcccggctggcctgacaatcgtcatcgttcgtgaagatttgctgggcaaagcgaatatcgcgtgtccgtcgattctggattattccatcctcaacgataacggctccatgtttaacacgccgccgacatttgcctggtatctatctggtctggtctttaaatggctgaaagcgaacggcggtgtagctgaaatggataaaatcaatcagcaaaaagcagaactgctatatggggtgattgataacagcgatttctaccgcaatgacgtggcgaaagctaaccgttcgcggatgaacgtgccgttccagttggcggacagtgcgcttgacaaattgttccttgaagagtcttttgctgctggccttcatgcactgaaaggtcaccgtgtggtcggcggaatgcgcgcttctatttataacgccatgccgctggaaggcgttaaagcgctgacagacttcatggttgagttcgaacgccgtcacggttaatgccgaaattttgcttaatccccacagccagcctgtggggtttttatttctgttgtagagagttgagttcatggaatccctgacgttacaacccatcgctcgtgtcgatggcactattaatctgcccggttccaagagcgtttctaaccgcgctttattgctggcggcattagcacacggcaaaacagtattaaccaatctgctggatagcgatgacgtgcgccatatgctgaatgcattaacagcgttaggggtaagctatacgctttcagccgatcgtacgcgttgcgaaattatcggtaacggcggtccattacacgcagaaggtgccctggagttgttcctcggtaacgccggaacggcaatgcgtccgctggcggcagctctttgtctgggtagcaatgatattgtgctgaccggtgagccgcgtatgaaagaacgcccgattggtcatctggtggatgcgctgcgcctgggcggggcgaagatcacttacctggaacaagaaaattatccgccgttgcgtttacagggcggctttactggcggcaacgttgacgttgatggctccgtttccagccaattcctcaccgcactgttaatgactgcgcctcttgcgccggaagatacggtgattcgtattaaaggcgatctggtttctaaaccttatatcgacatcacactcaatctgatgaagacgtttggtgttgaaattgaaaatcagcactatcaacaatttgtcgtaaaaggcgggcagtcttatcagtctccgggtacttatttggtcgaaggcgatgcatcttcggcttcttactttctggcagcagcagcaatcaaaggcggcactgtaaaagtgaccggtattggacgtaacagtatgcagggtgatattcgctttgctgatgtgctggaaaaaatgggcgcgaccatttgctggggcgatgattatatttcctgcacgcgtggtgaactgaacgctattgatatggatatgaaccatattcctgatgcggcgatgaccattgccacggcggcgttatttgcaaaaggcaccaccacgctgcgcaatatctataactggcgtgttaaagagaccgatcgcctgtttgcgatggcaacagaactgcgtaaagtcggcgcggaagtggaagaggggcacgattacattcgtatcactcctccggaaaaactgaactttgccgagatcgcgacatacaatgatcaccggatggcgatgtgtttctcgctggtggcgttgtcagatacaccagtgacgattcttgatcccaaatgcacggccaaaacatttccggattatttcgagcagctggcgcggattagccaggcagcctgaatgaacaacgggcaataaatagccaaatctttctttatcaaaacgtcggcacattgtcggcgttttttttcggaccttgtgagtcattttgattaatggtagcgtcgcttgtcaatgtaagttgttgatacataatatttatatatgattaatcaacggatgattcacatgaagaatactaaattactgctggcgattgcgacctctgcagcattactgacagggtgtcaaaatacccacggtattgataccaatatggctatcagctccggtttaaatgcctataaagcagcaacattaagcgatgccgatgcaaaagcgattgccaatcagggctgtgccgaaatggacagcggcaatcaagtcgcaagtaaatccagcaagtacggtaaacgtctggcaaaaatcgccaaagcattgggtaacaatattaatggcacgccggtcaactataaggtttatatgaccagcgacgtcaacgcatgggcgatggcgaacggctgtgttcgtgtctacagtggcctgatggacatgatgaatgacaacgaaattgaaggcgttctgggccatgaactgggccacgtcgcgttgggtcactcgctggctgaaatgaaagcttcttatgcgatcgttgccgcacgcgatgccatttcagctaccagcggtgtggcttcccagctttcccgctcacaattaggtgatatcgcagaaggcgctatcaatgctaaatactcccgtgataaagagtccgaagcagatgatttctcctttgatctgttgaagaaacgtggcatcagcacccaggggctggttggcagctttgaaacactggctagcctggatggcggtcgcacccagtccatgtttgactctcacccaccatcaacagagcgtgcgcaacacatccgtgatcgtatcgcctctggtaagtaaatcattgtcatctttcgggctggtcttctgccagcccgctataattgcgcaataaatccccatctgaatacagacaaaactggtttttgcacacaacgttaacgatttgtggcgtcggcgcgtataatgcgcgcggttatgttaacggtacgcctgttttaaggagataaagatgacggcaattgccccggttattaccattgatggcccaagcggtgcagggaaaggcaccttgtgtaaggctatggcggaagcgttgcaatggcatctgctggactcgggtgcaatttatcgcgtactggcattggcggcattacatcaccatgttgatgttgcgtcggaagatgcgctggtaccgctggcatcccatctggatgtacgttttgtgtcgaccaatggcaatctggaagtgatcctcgaaggggaagatgtcagcggcgaaattcgtactcaggaagtggcgaatgcagcttcacaagtcgcggcattcccacgcgttcgtgaagcattattgcgtcgccaacgcgcgtttcgcgaattaccaggtctgattgccgatggccgcgacatgggaacggtggtattccctgatgcaccagtgaaaattttccttgacgcctcctcggaagaacgtgcgcatcgccgcatgctacagttgcaggagaagggctttagtgttaactttgagcgccttttggccgagatcaaagaacgcgacgaccgcgatcgtaaccgagcggtagcgccactggttccggcagccgatgctttagtgttggattccaccaccttaagcattgagcaagtgattgaaaaagcgctacaatacgcgcgccagaaattggctctcgcataagcgaccgaatttgcagtacccccgttgcaatggaatgacagcgggtatgttaaacaaccccatccggcatggagccaggtggacgttaaatataaacctgaagattaaacatgactgaatcttttgctcaactctttgaagagtccttaaaagaaatcgaaacccgcccgggttctatcgttcgtggcgttgttgttgctatcgacaaagacgtagtactggttgacgctggtctgaaatctgagtccgccatcccggctgagcagttcaaaaacgcccagggcgagctggaaatccaggtaggtgacgaagttgacgttgctctggacgcagtagaagacggcttcggtgaaactctgctgtcccgtgagaaagctaaacgtcacgaagcctggatcacgctggaaaaagcttacgaagatgctgaaactgttaccggtgttatcaacggcaaagttaagggcggcttcactgttgagctgaacggtattcgtgcgttcctgccaggttctctggtagacgttcgtccggtgcgtgacactctgcacctggaaggcaaagagcttgaatttaaagtaatcaagctggatcagaagcgcaacaacgttgttgtttctcgtcgtgccgttatcgaatccgaaaacagcgcagagcgcgatcagctgctggaaaacctgcaggaaggcatggaagttaaaggtatcgttaagaacctcactgactacggtgcattcgttgatctgggcggcgttgacggcctgctgcacatcactgacatggcctggaaacgcgttaagcatccgagcgaaatcgtcaacgtgggcgacgaaatcactgttaaagtgctgaagttcgaccgcgaacgtacccgtgtatccctgggcctgaaacagctgggcgaagatccgtgggtagctatcgctaaacgttatccggaaggtaccaaactgactggtcgcgtgaccaacctgaccgactacggctgcttcgttgaaatcgaagaaggcgttgaaggcctggtacacgtttccgaaatggactggaccaacaaaaacatccacccgtccaaagttgttaacgttggcgatgtagtggaagttatggttctggatatcgacgaagaacgtcgtcgtatctccctgggtctgaaacagtgcaaagctaacccgtggcagcagttcgcggaaacccacaacaagggcgaccgtgttgaaggtaaaatcaagtctatcactgacttcggtatcttcatcggcttggacggcggcatcgacggcctggttcacctgtctgacatctcctggaacgttgcaggcgaagaagcagttcgtgaatacaaaaaaggcgacgaaatcgctgcagttgttctgcaggttgacgcagaacgtgaacgtatctccctgggcgttaaacagctcgcagaagatccgttcaacaactgggttgctctgaacaagaaaggcgctatcgtaaccggtaaagtaactgcagttgacgctaaaggcgcaaccgtagaactggctgacggcgttgaaggttacctgcgtgcttctgaagcatcccgtgaccgcgttgaagacgctaccctggttctgagcgttggcgacgaagttgaagctaaattcaccggcgttgatcgtaaaaaccgcgcaatcagcctgtctgttcgtgcgaaagacgaagctgacgagaaagatgcaatcgcaactgttaacaaacaggaagatgcaaacttctccaacaacgcaatggctgaagctttcaaagcagctaaaggcgagtaattctctgactcttcgggatttttattccgaagtttgttgagtttacttgacagattgcaggtttcgtcctgtaatcaagcactaagggcggctacggccgcccttaatcaatgcagcaacagcagccgcttaatttgcctttaaggaaccggaggaatcatgaccaagtcagaattgatagaaagacttgccacccagcaatcgcacattcccgccaagacggttgaagatgcagtaaaagagatgctggagcatatggcctcgactcttgcgcagggcgagcgtattgaaatccgcggtttcggcagtttctctttgcactaccgcgcaccacgtaccggacgtaatccgaagactggcgataaagtagaactggaaggaaaatacgttcctcactttaaacctggtaaagaactgcgcgatcgcgccaatatttacggttaagttttttactcaaacttgaacgagagaaaagcacctgtcgggtgcttttttcatttctctaatctggaactggaagctgcctcgcagagttttgaacagttttcaccctttcgttaaattcttctgaatatgcctcggggaacgcaaaattcccaccagacaaccgctcaacaaagttgcacactttccataaacagggaggggtgcatgaaaataacgacagtcggtgtatgcataattagcggaatttttccgttgctgattttgccccaattgcctgggacattaacccttgcgtttctgactctcttcgcctgcgtactggcatttatccctgttaaaaccgtccgttatatcgcgctgacgttgctgtttttcgtttggggcatattatcagcaaagcaaattttgtgggcaggagaaaccttaactggcgcgacgcaggatgcaattgttgagatcactgcaactgacggcatgaccactcattacggtcaaattactcatctacaaggtcgacgtatattccctgcgtcaggtctcgtgatgtatggcgaatatcttccgcaagcggtttgtgctggacaacaatggtcaatgaaactcaaagttcgtgcagttcatggccaacttaatgatggcggctttgatagccagcgttatgccattgcccagcatcagccgctcaccggccgttttctgcaggcaagtgtcattgaaccgaattgtagcctgcgtgcacagtatctggcgtcactacaaacaacgctgcaaccctatccgtggaatgcggttattcttggtttaggtatgggggaacggttatccgtccccaaagaaatcaaaaatatcatgcgcgatactggaacggcgcatttaatggcgatatcgggattgcacatcgcttttgcggcgttgctggctgccggactcattcgcagtggacaaatttttctgcctgggcgctggatccactggcaaataccattaattggcggaatctgctgtgctgctttttatgcctggttgacgggaatgcaacctcctgcattgcgtaccatggtggcgcttgctacgtggggaatgcttaagttaagtgggcgacagtggagtggctgggatgtatggatatgttgtctggcggcaattttgctgatggatcctgttgccattctctcgcaaagtttatggctctctgccgctgcggtcgcggcattgatattttggtatcagtggtttccctgtcctgagtggcaactgccgccggtattgcgtgcagttgtttccctcatccatctgcaactgggaatcacacttctgcttatgcccgtgcaaatcgtcatatttcatggcattagtctgacctcgtttattgcaaatctattagcaattcccttggtgacatttatcacggttccgttgatcctcgccgcgatggttgtgcatttaagcgggccgttaatcctggagcaagggttatggtttcttgccgaccggtctttggctttacttttctgggggttaaagagtttgccggaagggtggatcaacattgctgaatgttggcaatggctatcattttccccatggttcttactggtggtatggcgattaaacgcctggcgaacgttgccagcaatgtgtgtggctggaggcttgctgatgtgctggccgctgtggcaaaaacctcgacctgacgagtggcagctgtacatgcttgatgtcgggcaagggctggcaatggtgatagccagaaacggcaaagcgattctctatgacacaggactggcctggcctgaaggggatagtgggcaacaactgattatcccctggctccactggcataatcttgaaccggaaggcgttattctgagccatgaacatctggatcaccggggagggctggattcaatattgcatatatggccgatgttatggatcagaagtccgttaaactgggaacatcatcagccctgtgtgcgtggcgaagcgtggcaatggcaaggattgcgtttcagcgcgcactggcctttacaaggtagcaacgataaaggaaataaccattcctgtgtggttaaggttgatgacgggacgaatagcattcttctaaccggtgatattgaagccccagctgaacaaaagatgctaagccgttactggcagcaagtgcaggcaacattgcttcaggtacctcaccatggcagtaatacctcatcatcgttgccattaattcagcgagtgaatggaaaagtggcactcgcatcggcatcgcgctataacgcatggcgactgccctctaacaaagttaagcatcgctatcaactgcaaggatatcaatggattgatactccacatcaaggtcaaacaacggtcaatttttcagcgcaaggctggcggattagcagcctcagggagcaaattttacctcgttggtatcatcagtggtttggcgtgccagtggataacgggtagaatatgcggctatttcaacaaatgctggttttttgaatgcataacgacaaagatctctctacgtggcagacattccgccgactgtggccaaccattgcgcctttcaaagcgggtctgatcgtggcgggcgtagcgttaatcctcaacgcagccagcgataccttcatgttatcgctccttaagccacttcttgatgatggctttggtaaaacagatcgctccgtgctggtgtggatgccgctggtggtgatcgggctgatgattttacgtggtatcaccagctatgtctccagctactgtatctcctgggtatcaggaaaggtggtaatgaccatgcgtcgccgcctgtttggtcacatgatgggaatgccagtttcattctttgacaaacagtcaacgggtacgctgttgtcacgtattacctacgattccgaacaggttgcttcttcttcttccggcgcactgattactgttgtgcgtgaaggtgcgtcgatcatcggcctgttcatcatgatgttctattacagttggcaactgtcgatcattttgattgtgctggcaccgattgtttcgattgcgattcgcgttgtatcgaagcgttttcgcaacatcagtaaaaacatgcagaacaccatggggcaggtgaccaccagcgcagaacaaatgctgaagggccacaaagaagtattgattttcggtggtcaggaagtggaaacgaaacgctttgataaagtcagcaaccgaatgcgtcttcaggggatgaaaatggtttcagcctcttccatctctgatccgatcattcagctgatcgcctctttggcgctggcgtttgttctgtatgcggcgagcttcccaagtgtcatggatagcctgactgccggtacgattaccgttgttttctcttcaatgattgcactgatgcgtccgctgaaatcgctgaccaacgttaacgcccagttccagcgcggtatggcggcttgtcagacgctgtttaccattctggacagtgagcaggagaaagatgaaggtaagcgcgtgatcgagcgtgcgactggcgacgtggaattccgcaatgtcacctttacttatccgggacgtgacgtacctgcattgcgtaacatcaacctgaaaattccggcagggaagacggttgctctggttggacgctctggttcgggtaaatcaaccatcgccagcctgatcacgcgtttttacgatattgatgaaggcgaaatcctgatggatggtcacgatctgcgcgagtataccctggcgtcgttacgtaaccaggttgctctggtgtcgcagaatgtccatctgtttaacgatacggttgctaacaacattgcttacgcacggactgaacagtacagccgtgagcaaattgaagaagcggcgcgtatggcctacgccatggacttcatcaataagatggataacggtctcgatacagtgattggtgaaaacggcgtgctgctctctggcggtcagcgtcagcgtattgctatcgctcgagccttgttgcgtgatagcccgattctgattctggacgaagctacctcggctctggataccgaatccgaacgtgcgattcaggcggcactggatgagttgcagaaaaaccgtacctctctggtgattgcccaccgcttgtctaccattgaaaaggcagacgaaatcgtggtcgtcgaggatggtgtcattgtggaacgcggtacgcataacgatttgcttgagcaccgcggcgtttacgcgcaacttcacaaaatgcagtttggccaatgatcgaaaaaatctggtctggtgaatcccctttgtggcggctattgctgccactctcctggttgtatggcctggtgagtggcgcgatccgtctttgctataaactaaaactgaagcgcgcctggcgtgcccccgtaccggttgtcgtggttggtaatctcaccgcaggcggcaacggaaaaaccccggtcgttgtctggctggtggaacagttgcaacagcgcggtattcgcgtgggggtcgtatcgcggggatatggtggtaaggctgaatcttatccgctgttattgtcggcagataccacaacagcacaggcgggtgatgaacctgtgttgatttatcaacgcactgatgcgcctgttgcggtttctcccgttcgttctgatgcggtaaaagccattctggcgcaacaccctgatgtgcagatcatcgtaaccgacgacggtttacagcattaccgtctggcgcgtgatgtggaaattgtcgttattgatggtgtgcgtcgctttggcaatggctggtggttgccggcggggccaatgcgtgagcgagcggggcgcttaaagtcggttgatgcggtaatcgtcaacggcggtgtccctcgcagcggtgaaatccccatgcatctgctgccgggtcaggcggtgaatttacgtaccggtacgcgttgtgacgttgctcagcttgaacatgtagtggcgatggcggggattgggcatccgccgcgcttttttgccacgctgaagatgtgtggcgtacaaccggaaaaatgtgtaccgctggccgatcatcagtctttgaaccatgcggatgtcagtgcgttggtaagcgccgggcaaacgctggtaatgactgaaaaagatgcggtgaaatgccgggcctttgcagaagaaaattggtggtatttgcctgtagacgcacagctttcaggtgatgaaccagcgaaactgcttacgcaactaaccttgctggcttctggcaactagttacgccgcggcagcgttcgattgatggagtcatgaatgtcgctgccgcacctctcccttgctgatgcgcgtaatcttcaccttgccgcacaaggcctgttaaacaaaccccgccgtcgagcgtcgttggaggatattccggcaacgatctcccgcatgtccttgctgcaaatcgataccatcaatattgttgcccgtagtccatatctggtgcttttcagtcgtctgggaaattatcctgcccagtggctggatgagtctctggcgcgtggcgaattaatggaatactgggcgcatgaagcctgctttatgccgcgtagcgactttcgtcttattcgccaccgcatgctggcacctgaaaaaatgggctggaaatacaaagacgcctggatgcaggaacatgaggcggaaattgcacagttaattcagcatattcatgataaggggccggtacgttcagccgattttgagcatcctcgtaaaggtgcaagcggctggtgggaatggaagccgcataaacggcatctggaaggtttatttactgccggaaaggtgatggtgattgaacggcgcaacttccagcgcgtttatgatttaacccaccgtgtcatgcctgactgggatgatgagcgcgatctcgtttcgcaaacagaagcagaaatcatcatgctggataacagtgcgcgtagcctgggaatattccgcgaacagtggctggcagattactatcggctgaaacgtccggcactggcggcgtggcgcgaagcgagggctgaacagcagcaaatcattgctgtgcatgttgaaaaattgggcaatctttggctgcatgatgatttgctgccgctactcgagcgagcgctggccggaaagctcactgcaacgcacagcgcggtactttcgccttttgatcctgttgtctgggatcgcaaacgcgcagagcagctttttgattttagctaccggctggagtgctataccccagcgccgaaacgccagtatggctattttgttctgccgttattacatcgtgggcaattagttgggcgaatggatgccaaaatgcatcgccagacaggcatccttgaagttatctctctgtggttacaggaaggtattaaaccaacgacaacgctgcaaaaagggctacgtcaggcgattactgatttcgctaactggcagcaggcaacgcgggtgacattaggatgctgcccgcaaggcctctttactgattgccgcaccggctgggaaatagaccccgtcgcataaatgattatgataagatttatgcattcataacccgatccatctggaggaactatggatcatcgtctgcttgaaatcattgcctgcccggtttgcaacggaaaactttggtataaccaggaaaaacaagagcttatttgcaaactggacaacctcgctttcccgctgcgtgatggcattccagtgttgctggaaacggaagcccgcgtgctgactgctgatgagagtaaatcatgagttttgtggtcattattcccgcgcgctacgcgtccacgcgtctgcccggtaaaccattggttgatattaacggcaaacccatgattgttcatgttcttgaacgcgcgcgtgaatcaggtgccgagcgcatcatcgtggcaaccgatcatgaggatgttgcccgcgccgttgaagccgctggcggtgaagtatgtatgacgcgcgccgatcatcagtcaggaacagaacgtctggcggaagttgtcgaaaaatgcgcattcagcgacgacacggtgatcgttaatgtgcagggtgatgaaccgatgatccctgcgacaatcattcgtcaggttgctgataacctcgctcagcgtcaggtgggtatggcgactctggcggtgccaatccacaatgcggaagaagcgtttaacccgaatgcggtgaaagtggttctcgacgctgaagggtatgcactgtacttctctcgcgccaccattccttgggatcgtgatcgttttgcagaaggccttgaaaccgttggcgataacttcctgcgtcatcttggtatttatggctaccgtgcaggctttatccgtcgttacgtcaactggcagccaagtccgttagaacacatcgaaatgttagagcagcttcgtgttctgtggtacggcgaaaaaatccatgttgctgttgctcaggaagttcctggcacaggtgtggatacccctgaagatcttgagcgcgttcgcgctgaaatgcgctaatttcacttcacgacacttcagccaattttgggaggagtgtcgtaccgttacgattttcctcaatttttcttttcaacaattgatctcattcaggtgacatcttttatattggcgctcattatgaaagcagtagcttttatgagggtaatctgaatggaacagctgcgtgccgaattaagccatttactgggcgaaaaactcagtcgtattgagtgcgtcaatgaaaaagcggatacggcgttgtgggctttgtatgacagccagggaaacccaatgccgttaatggcaagaagctttagtacgcccggaaaagcccgacaactggcatggaaaaccaccatgctggcaagaagtgggactgtccgtatgccgactatttatggtgtgatgacgcatgaagaacaccccggccccgatgtcctgctactggagcggatgcgtggtgtttcggtggaggcaccagcccgaacaccagaacgctgggaacaactcaaagaccaaatcgttgaagccttactggcctggcaccgtcaggacagtcgcggttgcgtcggcgcggtcgacaatactcaggaaaatttctggccctcatggtaccggcaacatgttgaagtgctatggaccacgctcaatcagttcaataacaccggtctgacgatgcaggataagcggatcctgtttcgcactcgcgaatgtctcccggcattatttgaaggctttaacgacaattgtgtgctgattcacggtaacttctgtttacgcagcatgttgaaagattcgcgcagcgatcagttactggcgatggtcgggccgggactaatgctttgggcaccgcgagaatacgaactgttccgactaatggataattctctggcggaagatttgctctggagttacctgcaacgcgcgccagtggcggagtcgttcatctggcggcgttggttgtatgtgttatgggatgaagttgcgcaactggttaataccggacgatttagtcggcgcaacttcgatctggcatcaaaatcactcttgccgtggctcgcctgacgaaccttttagccactgccagatacggccaagcgtttcatagccaacacgatcgctatgcatcaaccagaccggagaagggattgcccgttcccacgggttaagcggcgagtcgatggccaactgattcgccggggctggtagcggatttaacccttcctgctgaaaaaagatcatcgcccgcggcagatgtgatgcggaggtcaccagcaggaaaggggcgtcaccaatcgcctgtttcactgctgcagcttcttcttcggtatcttttggcaaatccagggtgataatttgctcgcgcggcacgcccagcgattgcgcaactctggcacctacttccgctgtactcaccgtattggtttttgctacgcctcccgtgaagatcagttttgatcccggattttcgcgccataagcgaataccttcattcaggcgtggcagactgttattgattaaattagagctcggtgcccactgcgggttccaggtataaccacctccgagcaccacgatatagtccactttttgcgaattattccatgtcggataggtgctttcgatgggacgcagcaggcggtcggctaccggttgcaaactcaataacaagagcgccagccacccaatgctaataaaaatcttcccggttttttgaaaacggctaaaccacagcagcgccaggccagcgccaataatcaacaacatcagcggaagtggcagcaacatattgccaatcacttttttcagtgtaaaaagcatcctttctggttccttttttaaccatatagcaagggatcgccagcgatattacaccagacgggttcattctcgccgtggctgtgacaaaatagcgtctttatcagaaaacgtcttagccaaccggtggagaaagcaatgcaggatcgcaattttgatgatattgcggaaaagttttcccgtaacatttacggcaccaccaaagggcagcttcgacaggctattctgtggcaggatctcgatcgcgtgctggcggaaatgggcccgcaaaaactgcgtgtgctggatgctggcggtggagaagggcagaccgcaatcaaaatggccgagcgtgggcatcaggtcattttatgcgatctttctgcgcagatgatcgaccgcgcaaaacaggcggcagaagcaaaaggtgtgagcgacaacatgcaatttatacattgcgccgctcaggatgttgcttcgcatttggaaacgcccgttgatctgatattgttccatgcggtgctcgagtgggtggctgatccccgcagcgtattgcagaccctctggtcagtgttgcgtccaggcggcgtgttgtcgttaatgttctacaatgcgcatggtttgttgatgcataacatggtcgccgggaattttgattacgtgcaggcgggaatgccgaaaaagaaaaaacggacgctttcgccagattatccacgcgacccggcgcaggtttatctgtggctggaagaagctggttggcaaattatgggtaagacaggcgttcgcgtgtttcatgattatctgcgcgagaaacaccagcagcgcgactgctatgaagcattacttgaattagaaacgcgttattgccgtcaggaaccgtatattaccctggggcgttatattcatgtcaccgcgcgcaaaccgcagagcaaggataaagtatgagtgaattttcccagacagtccccgaactggttgcctgggccagaaaaaatgacttctccatctcgctgccggtagaccgactctcttttctgctggcggttgccacgctgaacggcgagcgtctggatggtgagatgagtgaaggcgagctggtggatgcattccgccatgtgagtgatgcgtttgagcaaaccagcgaaaccatcggcgtgcgcgccaataacgcgatcaacgacatggtgcgtcaacgtctgctgaaccgctttaccagcgagcaggcggaagggaacgcaatttaccgtctgacgccgctcggcatcggcattactgactactacatccgtcagcgcgagttttctacgctgcgtctttctatgcagttgtcgattgtggcgggtgagctcaaacgcgcagcagatgccgccgaagagggcggtgatgaatttcactggcaccgtaatgtctatgcgccactgaaatattcggtagcagaaattttcgacagtatcgacctgacgcaacgtctgatggacgaacagcagcagcaggtgaaggacgatatcgcccagttgctgaacaaagactggcgggcggcgatttccagctgtgaattgttgctttcggaaacttccggaacgctgcgtgaattgcaggatacgctggaagcggcaggcgacaaattgcaggctaatctgttgcgcattcaggatgcgacgatgacccatgacgatctgcatttcgtcgatcgtctggtgttcgatctgcagagcaaactcgatcgtattatcagttggggccagcaatccatcgacttgtggattggctacgaccgccacgtacacaaatttattcgtaccgcgatcgatatggataaaaaccgcgtctttgctcagcggttacgtcagtcggtacaaacctattttgatgagccgtgggcgctaacttatgccaatgccgatcgtctgctggatatgcgtgacgaagagatggcactgcgcgatgaagaagtgactggggaacttcctgaggatctggaatacgaagagtttaacgagatccgcgaacagctggcggcgatcatcgaagaacaacttgccgtgtacaaaaccagacaagtgccgctggatcttggtctggtggtacgcgaatatctgtcacagtatccgcgtgcacgtcactttgacgttgcgcgtattgttattgatcaggcggtacgtcttggcgtagcgcaagcagatttcaccggactgccagcgaaatggcagccgattaatgattacggagccaaggtacaggcgcatgtcatcgacaaatattgaacaagtgatgccggttaagctggcgcaggcgctggcgaatccgttatttccggcgctggacagcgccttacgttcaggacgccatattggcctcgacgaactggataatcatgcattcctgatggattttcaggaatatctggaagagttttacgcgcgttataacgttgagcttattcgcgcaccagaagggttcttctatttacgcccacgttccaccacgctgatccctcgttccgtcttgtcggaactggatatgatggtcgggaaaatcctctgttatctctatctcagcccggaacggctggcgaatgaggggattttcacccagcaggaactgtacgacgaactgctcaccctggccgatgaagcaaaactgctgaaactggtgaacaaccgttcaaccggttcagacgttgaccgtcagaagttgcaggagaaagtacgttcttcgctcaaccgtctgcgtcgtttaggcatggtgtggtttatgggccacgacagcagcaagtttcgcattaccgaatcggtgttccgcttcggagccgatgtgcgtgctggcgacgatccccgtgaagcacagcgtcgcctgattcgtgatggcgaagcaatgccgattgaaaatcatctgcaactcaacgatgaaaccgaagagaatcagccagatagcggagaggaagaataatgattgaacgcggtaaatttcgctcactgacgctgattaactggaacggcttttttgcccgaacttttgaccttgacgagctggtcacgacgctttctggcggtaacggggcgggtaaatccaccaccatggcggcgttcgttacggcgctgatccccgacctgaccctgctgcatttccgtaacactacggaagccggggccaccagcggttcgcgcgataaaggtctgcacggtaagctgaaagcgggtgtctgttattcgatgctcgacaccattaactcgcgccaccagcgcgtggtggtcggtgtgcgtctgcaacaggttgccggacgcgatcgtaaagtggatatcaagccgtttgccattcagggactgccgatgtcggtgcagccgacacagctggtgaccgaaaccctgaacgaacgccaggcgcgcgtgctgccgcttaacgagctgaaagacaagctcgaggcgatggaaggcgtgcagtttaaacagttcaactccattactgattaccactcgctgatgttcgatctgggcatcatcgcgcgtcgtctgcgctccgcatctgaccgtagcaaattctatcgtctgatcgaagcttcgctgtatggcgggatctccagtgccattacccgttctctgcgcgactacctgttgccagaaaacagcggcgtgcgtaaagcgttccaggacatggaagcggcgctgcgtgaaaaccgtatgacgctggaagcgattcgtgtcacccagtcggaccgcgacctgtttaagcatctgatcagcgaagccaccaactacgtggcggcggactacatgcgtcacgccaacgagcgccgtgtccatctcgacaaagccctggagtttcgtcgcgagctacatacttcgcgtcagcaactggcggctgagcagtacaaacacgtcgatatggcgcgtgagctggcagagcacaacggtgccgaaggcgatctggaagcggattatcaggcggccagtgatcacctgaacctggtgcaaaccgcactgcgtcagcaggagaagatcgaacgctacgaagcggatctcgatgagctgcagatccgtctggaagagcaaaatgaagtggtggcagaagccatcgaacgccagcaagagaatgaggctcgtgcggaagctgccgaactggaagtggacgagctgaaaagccagcttgctgactaccagcaggcgctggacgtccagcaaacgcgcgcgatccagtataaccaggcgattgctgcgcttaatcgtgccaaagaactgtgccatctgccggacttaaccgccgactgcgccgccgaatggctggaaaccttccaggcgaaagagctggaagcgactgaaaaaatgctctctcttgagcagaaaatgagcatggcgcaaaccgcgcacagccagtttgagcaggcttatcagctggtggtggcaatcaacggcccactggcgcgtaacgaggcgtgggatgtcgctcgcgaactattgcgcgaaggggtcgatcagcgtcacctggcagagcaggttcagccgctgcggatgcgattaagcgaactggaacagcgtctacgcgagcagcaagaagctgagcgtctgctggcagatttctgcaaacgtcagggcaagaattttgatatcgacgaactggaagccctgcatcaggaactggaagcacgcattgcctctctttccgatagcgtgtctaacgcccgtgaagagcgcatggcactgcgccaggagcaggaacagctgcagtctcgcattcagagtttgatgcagcgtgcgccggtttggctggcagcgcaaaacagtctcaaccagttgagcgaacagtgcggcgaagagtttacctccagccaggacgtcaccgaatatctgcaacagttgctggagcgtgagcgagaggcgattgttgaacgcgatgaagtgggcgcgcgcaaaaacgccgtcgatgaagagatcgaacgtttaagccagcctggcggctctgaagatcagcgtctgaacgcgctggcggagcgttttggtggtgtgctgctgtcagaaatttatgacgacgttagcctggaagatgcgccgtacttctcagcgctgtatggcccgtcacgccacgccatcgtggtgccagatctgtcacaggtaactgaacacctggaaggcttgaccgattgcccggaagatctctatctgatcgaaggagatccgcagtcattcgatgacagcgtgttcagcgttgatgagctggaaaaagcggtagtggtgaaaatcgccgatcgtcagtggcgttattcacgtttcccggaagtgccgctgtttggtcgtgctgcgcgtgaaagccgtattgaaagcctccatgccgagcgtgaagtgctttccgaacgcttcgccacgctctcctttgatgtacagaaaactcagcgtctgcatcaggcgttcagccgctttatcggcagtcatctggcggttgcgtttgagtctgacccggaagcagaaatccgtcaactgaacagccgtcgcgtcgaactggagcgggcgttaagtaatcatgaaaatgataaccagcagcagcgtattcagtttgagcaggcgaaagagggcgttacggcgctgaaccgcattctgccgcgtctcaacctgttggctgatgacagcctggcggatcgcgtcgatgaaatccgcgaacgtctggatgaagcccaggaagccgcgcgttttgttcagcagtttggcaatcaactggcgaaactggaaccgattgtttcggtattgcagagcgacccggaacagttcgaacagttaaaagaagattacgcgtactctcagcagatgcagcgcgatgcccgtcagcaggcgtttgccctgacggaagtggtgcagcgtcgtgcgcactttagctattctgactcggcagaaatgcttagcggtaacagcgatctcaacgaaaaactgcgtgaacgtctggaacaggcggaagcggagcgtacccgcgctcgcgaagcgttgcgcggtcacgcagcgcagttgagtcagtacaaccaggtgctggcttcgctgaaaagttcttacgacaccaaaaaagagctactcaacgatctgcaacgtgaattgcaggatatcggcgtgcgtgctgatagcggggcagaagagcgggcgcgtattcgccgtgacgagctgcatgcgcaactgagcaataaccgttcacgccgcaatcaactggaaaaagcgcttaccttctgcgaagcggagatggacaacctgacccgcaaactgcgcaagctggagcgggattactttgagatgcgcgagcaggtagtgaccgccaaagcgggctggtgtgcggtgatgcgcatggtgaaagataacggcgttgagcgccgcttacaccgtcgtgagctggcttatctctccgctgatgatttgcgttccatgtcggataaggcgttaggtgcgctgcgtctggcggtggcggataacgaacatctgcgcgacgtgctgcgcatgtcggaagatccgaaacgtccggagcgtaaaattcagttcttcgtggcggtttatcagcatctgcgtgaacgtattcgtcaggatattattcgtaccgatgatccggtggaagctatcgaacagatggagattgaacttagccgtctgaccgaagaattaacctcccgtgaacagaaactggcgatcagttcccgcagcgtggcgaacatcattcgcaaaaccattcagcgcgagcagaaccgtatccgtatgctcaaccaggggttgcagaacgtatcgtttggtcaggtgaacagcgtgcgtctcaacgtgaacgtgcgtgaaacgcacgccatgctactggatgtgctctctgaacagcacgagcagcatcaggatctgtttaacagcaaccgtttgaccttctcggaagcgctggcgaaactgtatcaacgtcttaacccgcagattgatatggggcagcgcacgccgcagaccatcggtgaagaactgctggattaccgcaactatctggaaatggaagttgaggttaaccgtggttccgatggctggctgcgcgcagagtctggtgcattgtcgaccggtgaggcgattggtaccggtatgtcgattctggtgatggtggtacaaagctgggaagatgaatctcgccgcctgcgcggtaaagatatctctccttgccgcctgctgttcctcgatgaagcagcgcgactggatgctcgttctatcgccacgctgtttgaattgtgtgagcgtttgcaaatgcaactcatcatcgcagcgccggaaaatatcagcccggagaaaggcaccacctataaactggtgcgtaaagtcttccagaataccgaacacgttcatgtcgtcggcctgcgaggatttgcgccgcaactccctgaaacgcttccaggaactgacgaagcgccttctcaggcgagttaaaattaaggcggcagcaatgccgccttttctttttccgaaaactccgtttctgcactaaaaaagtggcacattacggcgcgcttttctttaaacttctttacattaggttatgtaaaaacgtatcggcgtttatatactgaagataagcctgatgagtaacaggcttgctcgtcatactttcgtgagtattggcgttgtacaggcaagtcgtaaaataacagcctggctattcagagtatgataaaaacagggggcaagggatgttgcttaatatgatgtgtggtcgtcagctgtcggcaatcagtttgtgcctggccgtaacattcgctccactgttcaatgcgcaggccgatgagcctgaagtaatccctggcgacagcccggtggctgtcagtgaacagggcgaggcactgccgcaggcgcaagccacggcaataatggcggggatccagccattgcctgaaggtgcggcagaaaaagcccgcacgcaaatcgaatctcaattacccgcaggttacaagccggtttatcttaaccagcttcaactgttgtatgccgcacgcgatatgcaacccatgtgggaaaaccgtgatgctgttaaagccttccagcaacagctggcagaggtggcgattgccggtttccagccgcagtttaataaatgggtagagttactgaccgatcctggtgttaacgggatggcacgcgacgtggtgctctctgatgcgatgatgggctatctccatttcattgcaaatattccggtcaaaggcactcgctggctatatagcagtaaaccttatgcacttgcaacgccgccgctctcggtgattaaccaatggcagctggcgctggataaaggtcaattgcctacgtttgttgcaggactggcaccgcagcatccgcaatatgcggcgatgcatgaatcgttactggccttactctgtgacaccaaaccgtggccccaactgaccggcaaagcaacgttgcgcccagggcagtggagtaacgacgtaccggcgttgcgcgaaatattgcaacgcacaggcatgttggacggggggccgaaaattactctacctggcgatgacacgccaactgacgcggtagtcagcccatccgctgttactgttgaaacagcagaaactaagccgatggataagcaaacgacgtctcgtagtaaacctgcgcctgccgttcgcgccgcctacgataatgaactggtggaagccgttaaacgttttcaggcatggcaaggattgggggcagatggtgctattggcccggcaacacgtgactggttaaacgtaacgcccgcccagcgtgctggtgtgttggctctcaacatccagcgattgcgcttgctgccaacagagctttctaccgggatcatggttaacattccggcctattcgctggtctactatcagaacggcaatcaggtgctggattcgcgagtcattgtcggtcgccccgatcgcaaaacgccgatgatgagcagtgcccttaacaacgtagtggtaaacccgccgtggaacgtacctccaactctggcacgcaaagatattctgccaaaagtgcgcaacgatccgggatatctcgaaagccatggctatacggtgatgcgcggctggaacagcagagaagcgattgacccatggcaggttgactggtctacaatcacggcctcgaatttaccgttccgcttccagcaggctccaggcccacggaactcgctggggcgctataaattcaatatgccgagttcagaggccatttatttgcatgacacgccgaaccacaatctgttcaagcgtgatacacgcgcattgagctcaggctgtgtacgagtgaataaagcttccgatctggcgaatatgctgttgcaggatgcaggctggaatgacaaacgtatttctgatgcgctgaagcagggtgatacacgttacgtcaatattcggcagtcgattccggtgaatctctactacctgacggcctttgttggtgcagatggtcgtacccagtatcgtacagatatttacaattatgatctgcctgcgcgatccagctcgcaaatcgtatcgaaagcggaacaattaatcaggtaaatgaagtagttcggggaaatcagttgtcgtaataattagcatgattgggggcgattctctgcagcccccgtcactgctggggttgagtcatcttgacgtctgctttacgggcggttaaggtgcctcttgtgcgccagaagtgcatataaacgataacattgacctgtagacttgattatcatggacaaattcgacgctaatcgccgcaaattgctggcgcttggtggcgttgcactcggtgccgccatcctgccgacccctgcgtttgcaacactctctaccccacgcccgcgcattttgacactcaataatcttcataccggagagtcaatcaaagcggagtttttcgatggcagaggctatattcaggaagaattggcaaaacttaaccattttttccgcgattaccgcgcgaacaaaataaagtccatcgacccaggattattcgaccagttgtatcgcctgcaagggttgttaggcacgcgcaaaccggtgcaactcatttccggttatcgttctattgataccaacaatgaactacgcgcccgcagccgtggagtagcgaagaaaagctatcacactaaaggccaggcgatggatttccatattgaaggtatcgcgttaagcaatattcgcaaagccgcgttatctatgcgcgcaggtggtgtaggatattatccacgtagtaactttgtgcatattgataccgggccagcacggcactggtagtaattgcttaacgaaacaggggcagtatgaactatcgtattattccggtcaccgcattctcccagaactgttcattaatctggtgtgaacaaacccgtctggccgcactggtcgatcctggcggcgatgcggaaaaaatcaaacaggaagttgatgacagcggcctgacactgatgcagatcctgctgacgcatggtcatctggaccacgttggcgcagcggcggaactggcgcaacattacggcgtgccggttttcggcccggaaaaagaagatgagttctggctgcaaggcttgcctgcgcaaagtcgtatgtttggtctggaagagtgccagccgctgacgccagatcgttggctgaacgaaggcgataccatcagcatagggaatgtgactttacaggtgttacattgccctgggcatacgccgggtcatgtcgtgttttttgatgatcgggcaaagctgctgatttctggcgatgttattttcaaaggcggagtagggcgcagtgacttcccgcgtggcgatcataatcaactgatttcttcaatcaaagataaattgctgccactgggggatgacgtgatatttattccgggtcacggaccattatccacacttggttatgaacgcctgcataatcccttcctgcaagacgaaatgcccgtctggtaaggcacataaaaaagcccgcttttaatgctggcctggatttctggcaaagtgcgctttgtttatgccggatgcggcacgagcgccttatccggcctacaaaatcgtgcaaattcaaaatattgcaggggacgcgtaggcctgataagcgtagcgcatcaggcaatgttgcgtttgtcatcagtctcagcccgcttttcagcgggcttcattgtttttaatgcttacagcactgccacaatcgcttcgcacagcggagccatgttatctggtgtcatcccggccacatttacgcgaccagaagcaaccgcatatacgccaaactcttcgcgcagacgcagcacttgttcttttgtcaggccactgaaggagaacatgccgttctgtttgatgataaagctgaagtcgcggtttgcgcctttttcctgcagcgtattgacgaacaactgacgcatacgctgaatacgctggcgcatatcagtcagctcttgttcccaaatcgcacgtaacgcatcgttgctcaggatggtggcaacaacagaagcgccgtgtgctggtgggttagagtagttagcgcgaatcgccgctttcatttggctgaatgcgcgatcaacggtttcactgtcggcagcaaccagagtacaagcgccaacacgctcgttgtacaggccaaagtttttagagtaggaactggcaacaatcagctctttatgcatagccgcgaaagcgcgcagtccttcagcatcttcttccagaccacgggcaaaaccctggtaagcgaagtcaaacagcggtaaccagcctttctcaacggagagttgtgccagtgtttgccattgttccagcgtagggtcgataccggttgggttatggcagcagccatggaacagcactacgtcgccagcctgagcttcattcaggctgttaatcagtgcatcgaagtcaagagtgtgattttccgcatcataataagcgtattcacgaacttccagacctgcagagttaaagacgctcttatggttcggccagcttgggttgctcacccacacacgcttaacgctggtattttttgccaggaaatcggcagccacgcgtagtgcgccagtgccccccggagtctgtgccgtgcgagcacgtttgtcattgatcagggcgctacctttaccaaacagcagttcctgagtgcagcgaccaaattcagggatgccgtcaatgccgaggtaatttttggtggtttcattttcgagcagatactgttcagcctttttcacgctggtcagtaccggggttttgcccgtctcatctttatagacaccaatcccgaggttaattttgccgggacgttcatcggcacgaaacagatcggccaggcccagaatcgggtcggcaggagcggcggtaatgttctcaaacatgacgaggttccattatggttacagaagggaagtccgctatcagggtaacgggagatttacaaaattccaactattactgatgaaaacgcaggctgtttttgcaagacgtgagattgctctggaaggtataaaaaaaacaggaccaaagtcctgttttttcggcatttaacaaagaggtgtgctattagaactggtaaacgatacccacagcaacggtgtcgtctgaacctacgcccagtttgttgtcagaatcgatctggttgatgatgtagtcaacataggtggacatgtttttgttgaagtagtaggttgcgcccacttcaaagtagttcaccagatcaacatcaccgataccttctacgtctttcgctttagatttggtgtaagcgatggacggacgcagaccgaaatcgaactggtattgcgcaactaacagaacgtcttgcgttttgttggcgaagccgctggtgtttgtaaatttattagtgatcggcgtagcgttacgggtttcaccgtagttcgctgccaggtagatgttgttcgcgtcgtacttcagaccagtagcccactgttcagcttttttaccgttgccaagaggttgagcttcttgcaggttggtacggtcagctgcaccataagcaccaacgataccaaagccttcgtattcgtagctgatagaaccgccaacaccgtcgccgttagaacggcgtgcagtgtcacgctcgtttttacccaggtactgaacagcgaagttcaggccatcaaccagaccaaagaagttggagttacgataggtagcaacgccgccaacacgaccaacgaagaagtcatcgctgtatgcagtatcaccaccaaattctggcagcatatcggtgtaacccagtgcatcataaaccacaccgtagttacggccgtaatcgaaagaaccaacgtcagcgtatttaagacccgcgaatgccagacgcgttttgttaccagtttgagcgtcagcgccttcagagttgttaccctggaagttatattcccactgaccataaccggtcagatcggaattgatttgagtttcccctttaaaaccaagacgggcataggtcatgtcgccattgccaccgtaactgttttcaccgttacccttggaaaaataatgcagaccaacagctttaccgtacagatctactttgttgccatctttgttatagatttctgcagcgtttgcagtacctgctactaacagagcagggacgatcactgccagaatattgcgcttcatcattatttattaccctcatggttttttttatgacacctgccactgccgtcaataagttctgtcaataaaaatttacggaactattgatgagagtttggtgtctttatgtgtctgcaggcatctttccattcaaactaacgtttcgctaccgtgaaagtgctacaaagataaagatttggtttcaaaaagaaaaaatatgtaaccaaaagtaaaatttaaggaactttgtgaacaccgtcatatttccatagagacgtgatgatatttacagcaattttaatctatttatatgatttccttatatttaaattaactaaacggaaattttgtttctgatggaaactttatcgacctggcacaaaatcttctttcagacatccagaatgccaaaaaatagtatgaaaattgtgctattagctaagaaaaaactaatccgcaataagaatgcggattagtttttgcgcgtaaatgttgcaatgtaatattccgtaacaggatgatcgttatggcggggttgcaaatagattgcttgacttaacaaacagataacttgacagaaaagataaaaaaagagccagcgggcgctggctcttgaagacgctaaattagaagctggcgttacgcggagtacgtgggaacggaatcacatcacgtacgttttgcacgccagttacgtaagcaatcagacgttcaaaaccaagaccgaaacctgaatgcggaacagtaccgtagcgacgcagatcgcgataccaccagtaatcttctttattcaggcccatttccagcatacgctcgtccagcacgtccagacgttcttcacgctgggagccaccaatgatctcaccgatgcccggagccagaacgtccatagccgcaacggttttaccgtcttcgttaaggcgcatatagaacgctttaatatctttcggatagtttttaaccactaccggtgctttaaagtgttcttccgccagataacgctcatgctcagaagagagatcgactccccagtaaaccgggttttcaaacttcctgccgcagttttcgagaatggtcactgcgtcggtataatccacctgcgcaaaatcggcttcaatgaagcgttccagacgtgaaacggcatctttatctacgcgttcagcgaagaatttcatgtcgtcagcgcgttcttcgagaaccgctttgaagacatatttcagcatggcttcagccagacccgcaatatcgttcaggttagcaaacgccacttccggctccagcatccagaattccgccaggtgacggctggtgttggagttttcagcacggaaagtcgggccgaaggtataaattttggacaatgcgcaagcgtaggtttcgccgttcaactggccagatacggtcaggaaagactctttaccaaagaagtctttgtcgaaatccactttgccctgatcgttacgcggcaggttttccagatccagcgtagaaacgcggaacatttcgcctgcaccttcggtatcagatgcggtaatcagtggcgttgaaacccagaagaatccctgctcgttaaagaagcgatgcagcgcctgcgccagcgtatggcgaacgcgcgcgacggcaccaatcaggtttgtgcgcggacgcaggtgagcgacttcacgcagatactcaatgctgtggcgttttgccgccatcgggtaagtgtctggatcttcaacccaaccagcaacttcaaccttgctggcctgaatttcaaattgttgcccctggcccggcgacgccacgactttacccgtcacaatgaccgagcagccggtggtcagacgcaggacgtcttcattgtaattgggcagagaattattgatgacagcctgtacaggatcaaagcaggaaccgtcataaacggcgaggaaggagatgccagcttttgaatctcggcgggtacgtacccatccgcgcacggtgacttcgctgtcaacggctacacggccctggagtacgtcggctacaggcacaacgctcataatattctctctgttaatagtcggaaaaaataaacacttgtccacccgtaaatggggggatacctatgttacctggcatctgcaatcagacaagcagaattcgcaaatgcagcgaaagatttcggaattaaaggtaaaaaaagggagccgattagctccctgatgatattaactggcttttttaatatgcggaaggtcgaacgctttgcgcagcgcccgaacaaacgctttatcatggcagatagttttgccagggctgtcagaaagtttcgccaccggtttaccgttacactctaccaacttaatgacaatattcaggggttttacctgggggatatcgcaggtcaggcgagtcccaataccaaaacttaattgcacgcgggaagagaagtggcggtatagctcaaccgctttgcgtaaatccagattgtcagagaaaaccagcgttttactctgtggatcaattcccagcttttcataatgtgcaatggctttttcaccccattcaaccgggtcgccagagtcatgacgcaggccctgataccgactagcgaactcgacaccgaaatcacgcaggaaagcatccatagtgatgcagtcggttaatgcaatgccaagttggtcgggatactcttccagccaggcagcaagtgcagctcgctggctgttggctagatccgggctgatttgctgatgtgcctggaaccattcgtgtgcctgtgttcccatcggcgtgagggaaagccgacgcgccagatcgtagttgctggtgcccacaaaccaggattcctgttgcagacgcttaacgatggtttcttgtacttcgcgagaaaaacggcgacgggtgccaaaatccatcagatggaagcgcgacatatcaagaccggcggttaacgccgagaagtcgactaatttgctttccagcgtgtcgagggcttgcgcaacgtcggcctgcggtgagcgatagcgatgtaccatttcactgataaccgccagcaaaggaacttcccagaggatgacttcacgccacgggccgcttaaacgaatatccagcttgccattatcgttggacacggtgacttgttccgggttaaagcggaactcgcgtaaccagttaagatagtcggccttaaagaaaggcagggcagaaagccactgatattcatcatcctgcaggcgcaggtgctgcatcgcctgaacctgttcacgaatagcatcggcataaatacccagcagatcgtcacctcggcaacgaaactccgccgcgacatgcacatcgtaatagtgatgaaacacggcttgctgcatatgcaacttataagcatctgtatccagcaacgagtgcagaacaggagaagcgaattgtgtcataggtgcgcagtagcgtcctcgtacaggagcgtttagtacaataaacatcttcaggaactgctggagtataccttgtttcgcaatttattgaaccccgatcacaccatatgccacctttctggtcgatggcattacgcggtgtatgttataaaaatgtagcaataaaggcgtttgtacctgaaaagatgaagattctgcatagcgcgatttacgcaacaggaatagactgaacaccagactctataaaagatgctaaaggttatttatgactcaacagccacaagccaaataccgtcacgattatcgtgcgccggattaccagattactgatattgacttgacctttgacctcgacgcgcaaaagacggtcgttaccgcggtcagccaggctgtccgtcatggtgcatcagatgctccccttcgtctcaacggcgaagacctcaaactggtttctgttcatattaatgatgagccgtggaccgcctggaaagaagaagagggcgcactggttatcagtaatttgccggagcgttttacgcttaagatcattaatgaaataagcccggcggcgaataccgcgctggaagggctttatcagtcaggcgatgcgctttgcacccagtgtgaagccgaaggtttccgccatattacgtattatctcgaccgcccggacgtgctggcgcgttttaccaccaaaattattgccgataaaatcaaatatcccttcctgctttccaatggtaaccgcgttgcgcaaggcgaactggaaaacggacgccattgggtacagtggcaggacccgttcccgaaaccgtgctacctgtttgcgctggtggcaggcgactttgatgtactgcgcgatacctttaccacgcgttctggtcgcgaagtagcactggagctgtacgtcgatcgcggcaaccttgatcgcgcgccgtgggcgatgacctcgctgaaaaactccatgaaatgggatgaagaacgctttggcctggagtatgacctcgacatctatatgatcgtcgcggtggatttcttcaatatgggcgcaatggagaataaggggctgaatatctttaactccaaatatgtgctggcccgcaccgacaccgccaccgacaaagattacctcgatattgaacgcgttatcggccatgaatatttccataactggaccggtaaccgagtgacctgtcgcgactggttccagctcagcctgaaagaaggtttaaccgtcttccgcgatcaggagttcagctctgaccttggttcccgcgcagttaaccgcatcaataatgtacgcaccatgcgcggattgcagtttgcagaagacgccagcccgatggcgcacccgatccgcccggatatggtcattgagatgaacaacttctacaccctgaccgtttacgagaagggcgcggaagtgattcgcatgatccacaccctgcttggcgaagaaaacttccagaaagggatgcagctttatttcgagcgtcatgatggtagtgcagcgacctgtgacgactttgtgcaggcgatggaagatgcgtcgaatgtcgatctctcccatttccgccgttggtacagccagtccggtacaccgattgtgaccgtcaaagacgactacaatccggaaaccgagcagtacaccctgaccatcagccagcgcacgccagccacgccggatcaggcagaaaaacagccgctgcatattccgtttgccatcgaactgtatgataacgaaggcaaagtgatcccgttgcagaaaggcggtcatccggtgaattccgtgctgaacgtcactcaggcggaacagacctttgtctttgataatgtctacttccagccggtgcctgcgctgctgtgcgaattctctgcgccagtgaaactggaatataagtggagcgatcagcaactgaccttcctgatgcgtcatgcgcgtaatgatttctcccgctgggatgcggcgcaaagtttgctggcaacctacatcaagctgaacgtcgcgcgtcatcagcaaggtcagccgctgtctctgccggtgcatgtggctgatgctttccgcgcggtactgcttgatgagaagattgatccagcgctggcggcagaaatcctgacgctgccttctgtcaatgaaatggctgaattgttcgatatcatcgacccgattgctattgccgaagtacgcgaagcactcactcgtactctggcgactgaactggcggatgagctactggctatttacaacgcgaattaccagagcgagtaccgtgttgagcatgaagatattgcaaaacgcactctgcgtaatgcctgcctgcgtttcctcgcttttggtgaaacgcatctggctgatgtgctggtgagcaagcagttccacgaagcaaacaatatgactgatgcgctggcggcgctttctgcggcggttgccgcacagctgccttgccgtgacgcgctgatgcaggagtacgacgacaagtggcatcagaacggtctggtgatggataaatggtttatcctgcaagccaccagcccggcggcgaatgtgctggagacggtgcgcggcctgttgcagcatcgctcatttaccatgagcaacccgaaccgtattcgttcgttgattggcgcgtttgcgggcagcaatccggcagcgttccatgccgaagatggcagcggttacctgttcctggtggaaatgcttaccgacctcaacagccgtaacccgcaggtggcttcacgtctgattgaaccgctgattcgcctgaaacgttacgatgccaaacgtcaggagaaaatgcgcgcggcgctggaacagttgaaagggctggaaaatctctctggcgatctgtacgagaagataactaaagcactggcttgataaataaccgaatggcggcaatagcgccgccattcggggaatttacccctgttttctcaggcgagtttcagattcaccacgttgcatcacccgttgcaacacctccgcttccagctccgctaatcgcaccgaccctaatcgacgcggacgggggatatccactgtcaaatccagaccaatttttccctcttcaattaacagcacccggtcagccatcgctaccgcttcgctcacatcatgcgtcaccaacagtacggtaaagccgtgctcctgccaaagtgacacaatcaaatcctgcatctcgagtcgcgttaaggcgtccagcgccccgagcggttcatcaagcaacaataatcccggtcgatgaatcaacgctcttgccagcgccactcgctgtttctgcccgccagaaagtgcggcaggccattcccctgcgcgattctccagtcctaccgcagccaacgctcgacgtgcggcatcgcgccactggcctttaaggcctaacccaacgttatcaatcaccgatttccacggtagcagacgcgcatcctgaaacatcattcgcgtgtcttcctgaatttcagccagcggtgtggtgcccgctaacacatcgcctgcggttggcgtttccagacctgccagcaggcgcagcagggtacttttgccaccaccgctgcggcccaccaccgccacaaactgacctgccggaatatgtaaatccagttggttcaggacgatattttccgcgtaatgtttgcttactgcattgagcaacaatggcgtgccctggttcagacgagcagtattcataccgtggcctccttcaaatgataagccgggttccagcgcaaccagaggcgctctaacagctgcgcgctgacgtcagccagtttgccgagcagggcgtaaagaataatagcgactaccaccacgtccgtttgcaaaaactcccgcgcattcatcgccagataaccaatgcctgaattggcagaaatggtttcggcaacaatcagcgtcagccacatcaggcccaacgcaaaacgcacgccgaccataattgagggcagggcaccaggcaggatcacatggataaacagcggtatgccggataatccatagctacgcgccatctccaccaacccgcgatcgatattacggatgccatgccaggtgttgatataaatggggaatagcgtaccgagcgccaccagaaagatttttgcggattcatcaatgccaaaccacaaaatcaccagcgggatcagcgccagatgcggcacgttgcgcaacatctgaattgaggtatccagcagccgttctccccagcgagatagcccgctaatcagtcccaaaatcaaccccagcgatccgccaattgaaaagccaatcagcgcccgccaggagctgatcgccagatgctgccacagttcgccgctggcggagagcgtccagaacgccgtcaccactccttccggtgaaggcaaaatacgcgtcgacagccagccaaccgaggaggccagttgccacaccgccacgatgcccaccggtaaaaaccagggggcaacgcgcaataaccacttcttcactggcgttgccattatttcttccttagctttgcgcgactttacgggggataaaatcattcgccaccgcttcgccttgcggattcagcggctgcggctggggaatttccgggatggcgacatccagaagcgggaacagcaactcgccaacccgatacgcttcttccagatgcggatagcccgaaagcacaaaactgtcgatgccaagcgcggcatattcgttgattcgcgcagcgaccgtaggaccatcgcccaccagcgccgtcccggcaccgccgcgcactaagccaacgcccgcccataaattggggctgatctccagattgtcgcgcttgccgttatgtaacgccgccattcgctgttgccctacggaatccgtccgggcgaatgcggcctgtgctttggcgatagtttcatcatcaagatgcgagattaaccgctcggcggcctgccacgcttcgtcgttagtttcacgaacaatcacatgcagacgaataccgaaacgaattttgcgtccatgcgcggcagctttcgcccgcacttgttcgattttctctttaaccagttccggcggttcgccccaggtgaggtagagatcaacctgttctgccgccagctcctgggcgacatctgacgatccgccaaagtaaagtggcggatacggctgttgaatcgccgggaagagcagttttgctccgcgcacatgaatatgtttaccgttgaaatcgacggtttctctctgcaataaacgccgccagacctgggtaaattccgccgaggcttcgtagcgctcgctatgatcaaggaacactccgtcgcctgccagctcttgtggatcgctgcctgtgaccaggttaaacaacgcacgtccatttgagagacggtcaagcgtggcggcctggcgggcggcaacggtaggtgaggttacgctgggacgcagggcgacaagaaacttcagccgctgcgtcaccgggatcatcgatgcggcaaccagccacgcatcttcgcaggagcgccccgttggaattagcacaccggtatagccaagacgatccgccgcttgcgcaatttgttgcagataaccgtgatcaaccgggcgtgaaccttcttccgttcccagataatgcccgtcaccgtgggtcggtaaaaaccagaacatattcagactcataattgttttccttccagttgagtgggctgccagatgcgctggcgaatatcgacttttttcggcaccagacgattttcataaaacagatctgccgtttgctgctgtaaggcggcaacctcggcgttaaccggtttgatggtggtaggagggcgatgatctaagtaagaggcaatcaccggtgccggtaagcccatcgtttttgccagtaaagcgatgctttgctcgcgctggctgcgggttaacgcatcggcctcactaaaggttgccagtacgccctgaataaaagcgccgtttttttctgcatagggacgagctgccagataaaacgatccagtttgattgagatcggtgccgtctttcagcacccgcacgccgccctgtaataatgcagcagagtagtagggatcccagatagcccaggcgtcaacgttaccttgctggaacgcggcgcgggcatcagcgggcgtcaggtaagtgggttggatatcggtaaacttaagtccggcctgacgcagtgcacgcagtaaaaggttgtgtgaactggaacctttctgaaaggcaactttgtgacctttaagatcggctacggttttgatcgggctgttttctgccaccagaatcacttcggctttgggcttcggtggctcgacgcccacgtacaccaaatcagccccggcagcctgggcaaagattggcggaatatccccggtactgccgagatcaatactgccaacgtttaacgcttccaacatttgcggacccgcggggaactccacccaggagatttttgattccggatagcgtttttccagtaactggtggctttttgccagcaccataccaatactgcctttctgatagcctatacgtaacgcttcaggcgaggattctgcagcaaccgcaaaagtagagacgctaagcaatcccgccagcgccagtttaatgatgttacgcatgggcattacctcgcagagacagaaggtcaggaacctgaacatcgcggcggtgcaatgcctgccagaaagtttctagcgcggtatcaagacgggtttgcagatttggcgtgaactggggtctgtgatggtaatcaattacttgtgagtcatcggcaaacacgccgtgcaggatctcctgagctttcagtgcgcttaaaactggtttaagggcataatcgaccgccagcagatgggccacggtaccgcccgtcgccagcggtagcaccactttgccttgcaaagcgcgttctggcagcaggtcgagcagggttttcaacgcaccggaataggcggctttatacacaggcgtggcgacaatcagcccatcggcctgttgcagctgttcggtgaaggtcttgagtgccggactatcgaaacgagcataaagtagatcttccggggcgaagttttgcagattccagtgataaacctctacatccaggccatttagtttttcccgcgcatattccagcaaggagctggagcgagaaggaaagcgaggactacccgccagggtgatgacacgcatactctctccttataaccaattgttctttttttgttaacattgataacaattcggtcagtctgtcggagagacaagaaaattccaaatataaattttgtgtatctttttctgaaaataaactaaagaaagggctttatatatcacgcatatttatttattggatagtcattagatgttgaatcaatgaattactcgttcagttaatatttaaatattcatgaaatctataaattaaagatttgtcacttattggatttagtatgcttgatttaaatggcggacaattattgttattattaagtctaatgtcatttaaaggcattatcatatttacgaagagatcaggatgataacgatgaaaaaaagtgtattgacggcgtttataactgtggtatgtgcaacgtccagcgttatggctgctgatgataatgctatcacggatggctcagtaacatttaatggtaaagttattgctccagcttgtaccctggtagctgcgacgaaagattccgtggtgactttgccagatgttagtgccacgaagttgcaaaccaatggtcaggtttctggcgtgcaaattgatgtgccaattgaattaaaagattgtgatactaccgtaacaaaaaatgcaacgttcacctttaatggcactgcggatactactcagattacagcgtttgctaaccaggcctcatctgatgctgctacaaacgtggccctgcaaatgtatatgaatgatggtacaacggccatcacgccagacacagaaaccgggaacattttgttgcaggatggagatcagacgttgacttttaaagttgattatatcgctacggggaaagcgacttcaggtaatgtgaatgcggtaacaaatttccatattaactattattaatagaactcattaattgttttattaattagtacccctccagtgttctggaggggatattcatattttttaagagtgactatttatgaaaacttgcataacaaagggaattgtgaccgtaagtttaacggcaatattactcagctgctcatccgcatgggcggcaggtaaaggcgggattggacttgcagcaacacgtcttgtttattcagaaggtgaagagcaaatttcactgggtgtacgtaacaccagtccggatgttccttatcttattcagtcatgggtgatgaccccagataataaaaaatcagcagactttattattacaccaccgctatttgtgctgaatccggcaaatgagaatctgttacgcattatgtacattggagcgccgttggcgaaagacagagaaacccttttcttcactagcgtacgggcagtcccttcaacaacgaagcggaaagagggaaataccctgaagattgccacacaaagcgtcatcaaacttttctggcgaccaaaaggtttagcgtatcccttaggcgaggctccggcgaaactgcgttgcacttcgtcagctgacatggttacggtcagtaacccaacaccttatttcattaccctgacagacctgaaaataggtggaaaagtagttaaaaatcaaatgatttccccctttgataaataccaattttctctgccaaagggggccaaaaatagcagcgtaacgtatcgaaccatcaatgactacggggcggaaacgccgcaactcaactgtaaatcgtaagccgtcttcagttaagagagcgagatgtatagaactcatcgacaacacagcctgttaagctctggtggagtgccatcgtttattggtgggctggtggtgtttgtgtcggcagcgttcaatgcacaagctgaaacctggttcgatcctgcttttttcaaagatgatccctcaatggtggccgatttgtctcgtttcgaaaaaggacaaaaaataacgccaggggtttatcgtgtcgatattgttctgaatcagacaattgtagatacgcgcaacgtcaattttgttgagataacgccagagaaggggattgccgcctgtttgacgactgaaagcctggatgcaatgggtgttaatactgatgcgtttccggcttttaaacaactggacaaacaagcgtgtgtgccattggcggagattattccggatgccagcgtaacgtttaatgtgaataaactccgtctggaaatttcagtaccgcaaatcgccatcaaaagtaatgcccgtggttatgtcccccctgaacgttgggatgaagggatcaacgcgctattactgggatattcgtttagcggggctaacagtattcatagcagcgcagacagtgattctggcgacagctattttctgaatttaaacagtggcgttaatttaggcccatggagattgcgcaacaattcaacatggagtcgtagtagtggccaaaccgcagaatggaagaatctcagcagctatttgcaacgggcggttattcctctgaaaggcgaactgaccgtaggtgatgattatactgcaggcgattttttcgatagtgtcagctttcgtggtgtgcagctggcgtcagatgacaacatgctgccagacagcctgaaagggtttgcgcctgtggtgcgtggtatcgccaaaagcaatgcccagataacgattaagcaaaatggttacaccatttaccaaacttatgtatcgcctggtgcttttgaaattagtgatctctattccacgtcgtcgagcggtgatttgttagttgaaatcaaagaagcggacggcagcgtcaatagctacagcgtaccgttctccagtgtgccattactccagcgtcaggggcgaatcaaatacgcggtgacactggcgaaatacagaaccaatagtaatgaacagcaggagagcaaatttgcccaggccacgttgcagtggggcggaccgtggggaacgacctggtatggtggtggacaatatgctgaatattaccgtgccgccatgtttggtctgggatttaacctcggcgatttcggagcaatttcgttcgatgcgacccaggcgaagagtacgctagcagatcaaagcgaacataaaggtcagtcatatcgttttctgtatgccaaaacgctcaaccacttgggcactaactttcaattgatgggctatcgctattcgacgtcgggtttctacaccctttccgacaccatgtataaacatatggatggctacgaatttaatgacggtgatgatgaagatacgccgatgtggtcgcgttattacaatttgttttacaccaaacgtggcaaactgcaggtcaatatctcccagcaattaggcgagtacggttcgttttatttaagtggtagccagcaaacttactggcatacggatcaacaggatcggctattacagtttggctacaacacgcaaattaaagatctttcgctggggatttcctggaactacagtaagtcccgtggtcaacctgatgctgatcaggtgtttgctctaaatttttccctgccgctcaatctgttgctccccagaagtaatgatagctataccaggaaaaaaaattacgcctggatgacctctaacaccagtatcgataacgaagggcacactacacaaaacctgggtttaacggagacattactcgatgacggtaacctgagctacagcgtgcaacagggatataacagcgaggggaaaacggctaatggtagcgccagcatggattacaaaggggcgtttgcggatgcccgagtgggctacaactacagcgataacggcagtcaacaacaactgaactacgctctttcaggcagtttagttgcccattcacagggcattaccctggggcaatcgctgggggaaactaacgttctgattgcagcaccaggcgcagagaatactcgtgtggcgaacagcaccgggctgaaaactgactggcgcggatataccgttgttccttatgccacttcttatcgggaaaatcgaatcgcacttgatgcggcgtcgttaaaacgtaacgtggatcttgaaaatgcagtagtcaacgtggttcccaccaaaggggcgttggttctggcggagttcaatgcccatgcgggtgcaagggtattaatgaaaacatcaaagcagggtataccgctgcgttttggcgcgatagcgacgctggacggcgtacaggctaatagcggcataattgatgatgatggctcgctctatatggcgggtttaccggcgaagggaacaataagcgtgcgctggggcgaagctcccgatcaaatttgtcatatcaattacgagcttaccgaacaacaaattaactctgcgattacgcgaatggatgccatatgcagataatctttggagaaaaatgcgtgtcattactacgactattttttgccgccgtcttaatgttatggtgcgctcaaaccgctgcttatagcgggcagtgtcatactactcaggggaatccgtatattggcgtcaattttggcgttaaaaccctggaggaagaagcaaatacggcaggggtagttaaagacaaattttatcagtggaacgaatcgaatgattattatgtttcctgtgattgcgataaagacaatgtcagaagtggccgatgggcattcgccgcggattcaccgttagtctatttaggcgacaactggtacaaaattaatgactatcttgccgccaaagttttattgcaggttaaaggcagttctcctactgcggttcctttcgaaaacgtgggcacagggggggatacccgatggcatatttgcgaccctggcggtcaacgtttaggtgggcagggggcaagcggtaatagcggtagcttttccctgaaaatattgcagccgttcgttggctcggtcgtcattcctcctatggcgctggcgcgattatatgaatgctacaacatacccgcaggtgattcctgcacgactacaggtacaccggttttagtgtattacctgtctggtacgatcaattcacttggctcatgttccgtcaatgccggagagacaattgaagttgatttaggtgatgtcttcgctgccaatttccgtgttgtagggcataaacctcttggggccagaacggcagaacttgcaattccagtcaggtgtaacacgggaaacgcgggattagttaatgtcaacctgagtctgacggcaaccacagaccccagctatccccaggcgattaagacgtcacgtcctggcgtgggcgtggtggtgaccgatagccagaacaacattatttcccctgctggtggaacattaccgctctctattcctgatgatgcagacagtatcgcgcgaatgaatgtctatccagtcagcacgacaggtgtaccaccagaaaccgggcgatttgaagccacggcaacggtgagaataaattttgattaacgcgtgaacgtatgaagaaaaaaacgatatttcagtgcgttatcttgttctttagcattcttaacatccatgtcgggatggctgggcctgaacaagttagtatgcatatttatgggaatgtggtcgatcagggctgtgatgtcgccaccaaaagtgcattacaaaatattcatattggtgattttaatatcagtgattttcaggccgcgaataccgtaagcactgctgctgatttgaatatcgatatcaccggttgtgccgctggtattactggcgcggacgtcctttttagcggcgaggctgacacccttgcgccgacactgctcaaactaactgacacaggcggaagcggtggtatggcaacggggattgccgtgcaaattcttgatgcgcaaagtcagcaagaaatcccgctcaatcaggtccagcctcttacgcccttaaaagccggggataacacactcaaatatcaacttcgttataagtccacaaaggcgggagcaacgggcggtaatgcgacggcggttctctattttgatctggtttaccagtgaaggagtgatgttgaaacggataatctggattctgttcttattgggattaacgtggggctgtgagctatttgcccatgatggcacggtcaacattagcggatcgtttcgccgtaatacatgcgtgctggcacaggatagcaagcaaatcaatgtgcagttaggcgatgtctcgctgacacgtttttctcatgggaattatggcccggagaaatctttcatcattaatttgcaggattgcggaacagatgtcagcacggttgacgtcaccttttcaggaacccccgacggagtgcagagcgaaatgttgtccattgaaagtggtacggatgcagccagcgggctggcaattgcgattctggatgatgcgaagatattgattccgcttaaccaggcgagtaaagactacagcctacatagcggtaaggtgccattaactttttatgcgcaattgcgacctgtcaatagcgatgtgcagtcgggtaaagtgaatgccagcgcgacatttgtacttcattatgactaatacgtggaacagattggcgctcttgattttcgccgttttatcgctgctggtggcgggtgaattgcaggcaggagtggtggtcggcggaacgcgatttatctttccggcagacagagaatcgatatctattttactgactaataccagtcaggaatcctggcttattaacagtaaaatcaaccgcccaacgcgttgggccgggggggaagcgtcgacagtgccagcaccattactggccgctccgccacttattctcctgaagcccggtacgacaggcacgttgcgcttgctgagaacggaaagcgacatcttgcctgtggatcgcgaaacgctatttgagttaagcattgccagcgtgccatccggcaaagttgaaaatcagagcgtaaaagtggcgatgcgctcggtatttaaactgttctggcgacccgaaggtttgccgggcgacccgctggaagcttatcaacaattacgctggacacggaattcgcagggtgtacaactcactaacccaacgccttattacattaacctgattcaggtgagtgtaaatggtaaagcgttaagtaatgtgggagttgtgccgcctaaaagccagcgtcagacaagctggtgtcaggcaatcgcaccgtgtcatgtcgcctggcgggcgataaatgattacggcgggttgagtgcaaagaaggagcaaaatctgccctgaaacaggttcggaaaacgtttgcgttttttttgccgcaggtcaattcccttttggtccgaactcgcacataatacgcccccggtttgcacaccgggaatccaggagagttcatgtactaccccttcgttcgtaaagcccttttccagctcgatccagagcgcgctcatgagtttacttttcagcaattacgccgtattacaggaacgccgtttgaagcactggtgcggcagaaagtgcctgcgaaacctgttaactgcatgggcctgacgtttaaaaatccgcttggtctggcagccggtcttgataaagacggggagtgcattgacgcgttaggcgcgatgggatttggatcgatcgagatcggtaccgtcacgccacgtccacagccaggtaatgacaagccgcgtctctttcgtctggtagatgccgaaggtttgatcaaccgtatgggctttaataatcttggcgttgataacctcgtagagaacgtaaaaaaggcccattatgacggcgtcctgggtattaacatcggcaaaaataaagatacgccagtggagcagggcaaagatgactatctgatttgtatggaaaaaatctatgcctatgcgggatatatcgccatcaatatttcatcgccgaataccccaggattacgcacgctgcaatatggtgaagcgctggatgatctcttaaccgcgattaaaaataagcaaaatgatttgcaagcgatgcaccataaatatgtgccgatcgcagtgaagatcgcgccggatctttctgaagaagaattgatccaggttgccgatagtttagttcgccataatattgatggcgttattgcaaccaataccacactcgatcgttctcttgttcagggaatgaaaaattgcgatcaaaccggtggcttaagtggtcgtccgcttcagttaaaaagcaccgaaattattcgccgcttgtcactggaattaaacggtcgcttaccgatcatcggtgttggcggcatcgactcggttatcgctgcgcgtgaaaagattgctgcgggtgcctcactggtgcaaatttattctggttttatttttaaaggtccgccgctgattaaagaaatcgttacccatatctaattatttcttcgaattcctctttataagataatcagggctttattttcagccctggttgttttatattcatcgctgttgcttatttagacattttgtacttttattgttgaggttattaagcgaagcgacaatggattgtgttgctgcggttttatagggtaggggagaggcagatgcgaattaaaccagacgataactggcgttggtattacgatgaagagcacgatcgaatgatgctcgatttagccaatggtatgctatttcgctcacgttttgcgcgcaagatgttgactccagatgccttttctcccgcaggcttttgcgttgacgacgccgcgctctatttctcttttgaagaaaagtgccgcgattttaatttatctaaagaacaaaaagccgaactggtgctgaatgcactggtagcaattcgctatctcaaaccgcaaatgccgaaaagctggcattttgtttcccatggtgaaatgtgggtgcccatgccgggcgatgcggcctgcgtttggttgagcgatactcacgagcaggtcaatttgctggtcgttgaatctggcgaaaatgccgcactatgcctgctggcacaaccctgcgttgttattgcgggtcgcgcgatgcagttgggcgacgccattaaaatcatgaacgacaggctgaaaccgcaggttaatgttgacagcttcagcctcgaacaggcagtctaacgcgccaacttaagtgcagtcttcggtacacagctacagcaaagaatggtgccatcatcgcccattgctgattttttcagcggcgtgacttcgccttctaaaagctgaacacggcaacttccacaaatgcccgcgcggcaagaataagggatacgaattccctgattttctaattgctccagcaacacctgttggttatttccacgaaatgcctgtccctgccagtcaatatctacatttgcgtccggttgttgcgtgatgttggcggtatcatcagcggcagctgcgccgtaaatttttgccggagccgttgccagaatttccacctcatcgccaacgcgaatcacgccgctattacgggcaattaaattctgaccaaaatcgacatcgccgttatcctgggcagtgcggaaagattgcaatgtttttaatggttcgcctgccggatgtttttgccctttttctgggctgacggtggtgaaaatacagcggctacaaggtttaaccacatcaaacaccacatcaccaatgcgaatcactttccagcgatcttcttcccaggctgacgcgccggaaaccaccagattggggcggaattgctccatttttacactggccggacaacgttgttggagatcacgtaacgaggcttcgttagcaagaaggtaaggatagccatcagcaaatgacagaggtacagtgttgtggcgtttcacgcgccgggtcatttgtggccccacccagcgtaattgcacttcgcgggagaaaaatccacttagccatttgttgatcgcgtctggcgcaattcgcgcggtaaaatgtgtgccccaaacttcggttggtgcgtcttgtgtggcgaaatcagcaaaacgaacatatgcgctactgccatctggtgcggtgagatgcaagccatcatgcacaggtgaaggagtaaaccgtaccatctggggaaactggcgagcggtaataaacgtaccgtcaggttccgtgatcataaagatgcgatcgaaggccagaccactgacatctgccagagcatgtgtaagaccaatgccgcgcatcgatttaacaggatgaataaaaagccggattaatgtcgccacggtgcggtcctcaaatgaaaataagccctcaactttatgacatgacgcgcttattagctataatgcgcaacaattttcttagcgcctgtcccattaggctattttatttgtcagtttggccctgggttatgctcgaaatcctcacgtacttgtgtacgctccggtttctccgcgctgtccatgtccagactgactgcaacaattacgcctactgcggtaggctcttagagtaaaagtgacgatatgaattctctgtttgccagtacggcccgtgggctggaagagctgttaaaaactgaactggaaaacctgggggccgttgaatgccaggtggttcagggtggggtccatttcaagggcgacacacggcttgtttaccagagcctgatgtggagccgcctggcctcgcgtattatgttgccgctgggcgagtgtaaggtttacagcgatttagacctctatctcggtgttcaggcgatcaactggacagagatgtttaatcctggcgcgaccttcgctgtccacttcagtggtttgaatgacaccatccgcaacagtcagtacggcgcgatgaaagtgaaagacgcgatcgtcgatgctttcacgcggaaaaatctgccgcgtccaaatgttgatcgcgatgcgccggatatccgcgttaacgtctggctgcataaagaaaccgccagtatcgctcttgatctgagtggtgatggtttacatctgcgtggctatcgcgatcgtgctggtattgcgccgatcaaagaaaccctggcagccgctattgtgatgcgatccggctggcagccaggaacaccgctgctcgatccgatgtgtggttccggtacgttgctgattgaagcagcgatgctggcgaccgatcgcgcaccaggcttgcaccgtgggcgttggggctttagcggctgggcgcagcatgatgaagctatctggcaggaagtgaaagcggaagcgcaaactcgcgcccgtaaaggcctggctgagtatagctctcatttttacggttcggacagcgacgcacgggtgattcaacgtgcacgcactaacgcccgtcttgcggggattggtgaactgatcacctttgaggtgaaagatgtcgcgcaactgaccaatccgctgccgaaagggccgtacggcacagtgttgagcaacccgccatacggggaacgtctggacagcgaaccggcgctgattgcgctgcatagcctgctgggtcggatcatgaaaaaccagtttggtggctggaatctctctttgtttagtgcctcgccggatctgctaagctgcttgcagctgcgtgcagacaaacagtacaaggcgaaaaacggcccgctggactgcgtacagaaaaattaccacgttgccgaaagcactccagacagcaaaccggcgatggtagcggaagactacaccaaccgcctgcgtaagaacctcaaaaaattcgagaagtgggctcgccaggaagggattgaatgttaccgcctgtatgacgccgatctgccagaatataacgttgccgttgaccgttatgccgactgggtggtggtgcaggagtatgcgccgccaaaaactattgatgctcacaaagcgcgtcagcgtctgttcgatattatcgctgcaaccatttcggtactggggattgcgccaaacaaactggtgctgaaaacccgtgaacgccagaagggcaaaaaccaataccagaaactgggcgagaagggcgagtttcttgaagttaccgaatataacgctcacttgtgggtgaacctgacggattatctcgatactggtctgttcctcgatcaccgcatcgcccgtcgtatgctcggtcagatgagcaaaggcaaagatttcctcaacctgttctcttataccggcagcgccaccgtgcatgcgggattaggcggtgcacgcagcaccaccaccgtggatatgtcgcgtacttatctggaatgggcagaacgcaacctgcgtctgaatggcctgaccgggcgtgcgcatcgcctgattcaggccgattgcctggcgtggctgcgtgaggcaaatgaacagttcgatctgatctttatcgatccgccaaccttctctaactcaaaacgaatggaagatgcgtttgatgttcagcgcgatcatctggcgctgatgaaagatttgaaacgtctgctgcgtgcaggtgggacgatcatgttctcgaacaacaaacgtggcttccgtatggatctcgacggcctggcaaaactgggactgaaagcacaagaaattacgcaaaaaacgctctcccaggatttcgcccgtaaccgccagatccacaactgctggctgattaccgcagcctgaaaggaatagtaatgtcattaatcagtatgcatggcgcatggctgtcgttcagcgacgcgccgcttctcgataacgcagaactgcatatcgaagataacgaacgtgtttgtctggtgggccgcaacggcgcaggcaaatcgacgttaatgaaaatcctcaaccgtgaacaagggctggatgacggtcgcattatttacgagcaagatttgattgtagcgcgtctgcaacaggatccgccgcgtaacgttgagggtagcgtttatgatttcgttgccgaaggcattgaagaacaagcggaatatctgaaacgctatcacgatatttcgcgcctggtgatgaacgacccgagcgagaaaaatctcaacgaactggcgaaggttcaggaacagctggatcaccacaacctgtggcagctggaaaaccgcatcaacgaagtgctggcgcaactggggttagatcctaacgttgcgctgtcgtcgctttccggcggctggttgcgtaaagcggcattaggacgcgcgctggtgagtaatccgcgcgtgctgttgcttgatgaaccgacaaaccacctggatattgaaaccatcgactggctggaagggtttttgaaaactttcaacgggacgattattttcatctcccacgaccgttcgtttatccgcaatatggcgacgcgcattgttgatctcgatcgcggcaagctggtgacctatccagggaattacgaccagtacctgctggaaaaagaagaagccctgcgcgtggaagaattacaaaatgccgagttcgatcgcaaactggcgcaggaagaggtgtggatccgccaggggatcaaagcacgccgtacccgtaatgaaggccgcgtacgcgccctgaaagcgatgcgtcgcgaacgtggtgaacgtcgcgaagtgatgggtaccgcaaagatgcaggtggaagaggccagccgctccggtaaaatcgttttcgaaatggaagacgtttgctaccaggttaacggtaagcaactggtgaaagatttttctgcccaggttctacgtggcgacaaaattgccctgattggtccgaatgggtgcggcaaaaccacgctgctaaaactgatgctcggtcagcttcaagcggacagcgggcgtattcacgttggcaccaaactggaagtggcttatttcgatcagcaccgcgcggaactggatcccgataaaacggtgatggataaccttgccgaaggtaagcaagaggtgatggttaacggcaagccacgccacgtattgggctatttgcaggactttctgttccatccgaaacgggcgatgacgccggtacgtgcgctttctggcggtgagcggaaccgcttgctgctggcgcgtttgttcctcaaaccaagcaacttattgattcttgacgaaccgaccaacgatcttgatgtcgaaacgctggaactgctggaagaactgatcgacagctatcagggcacggtattgctggttagccacgatcgtcagtttgtcgataacaccgttacagaatgttggatcttcgaaggcggcggtaaaattggtcgttatgtcggcggttatcatgatgcccgtggtcagcaagagcagtatgtggcgctcaaacagcctgcggtgaaaaaaaccgaagaagccgccgcggcaaaagcagaaactgtaaaacgcagcagtagcaaactaagctataaattgcagcgcgaactggagcagctaccgcaattgctcgaagatctggaggcgaagctggaagccctacagacgcaagtggcggatgcttccttcttcagtcagccgcatgagcagacgcaaaaagtgcttgctgatatggctgctgcagagcaggagctggagcaagcctttgaacgctgggagtatcttgaagcgttaaaaaatggtggctgatcgcaaaatagtcgatttaaacagagacagctgacaacggtaaaattgcctgatgaactgggtttatcaggcatgaaaaccaacactttgttagtcatctgtaaaatagcgcatcattaaggagtaccaatgtgcgaacatcatcatgccgcgaagcacatcctgtgctcgcagtgtgacatgctggtggcgttaccgcgccttgagcatggtcagaaagcggcatgtccccggtgtggcacaacgttaaccgtggcgtgggatgcccctcggcagcgtcccaccgcctatgcgttggctgcactgttcatgctgttgctgtccaacttgtttccttttgtgaatatgaacgttgcaggagttaccagtgaaattacattactggaaattcccggcgtgcttttttctgaggactacgccagcctcggcacctttttcctgttgtttgtgcaactggttcccgcgttttgtctgataaccattctgttactggtgaatcgcgcggaattaccggtccgtttaaaagagcaactggcacgggtgctttttcaactcaaaacctggggaatggcggagattttcctcgcgggtgtgctggtcagtttcgttaaactgatggcttacggcagcattggggtaggcagcagctttctcccctggtgtttattttgtgtcctgcaactgcgcgcttttcagtgcgttgatcgtcgctggttatgggacgacatcgccccgatgccagaactgcgccagccgctaaaaccaggcgtcacggggatacgtcaggggctgcgttcgtgctcctgttgtacggcaatccttcctgctgatgaacccgtgtgcccgcgttgtagtaccaaagggtacgttcggcgtagaaacagcctgcagtggacactcgcgctgcttgtaacgtccatcatgctgtatcttccggctaatattttgcccatcatggtgacggatttattaggctcgaagatgccgtcgacgattctcgctggggtcattctgttatggagcgaaggctcttatcccgtcgctgcggtgatctttctggccagtattatggtgccaacgttaaagatgatcgccatcgcgtggctgtgttgggatgccaaagggcatggcaagcgcgacagtgaaagaatgcatttgatttatgaagttgttgagtttgtaggccgctggtcgatgattgacgttttcgttatcgcggtgctctcggcgctggtgcgtatgggaggtttaatgagtatttatccggcaatgggtgcattaatgtttgctttagtcgtcataatgacaatgttttctgctatgacgtttgacccgcgtttgtcgtgggatcgtcaacctgaatcagagcatgaggagtcctgacagtatggaatctaataatggggaagccaaaatccagaaagtgaagaactggtctcccgtgtggatatttcctatcgtcacggcgctcattggggcctgggttcttttttatcattacagccatcagggaccggaagtgaccctgatcaccgcgaatgcggaaggaattgaaggtggcaaaaccaccattaaaagccgtagcgttgacgtcggcgtggttgaaagcgccacactggctgatgatttgacgcacgttgaaatcaaagcgcggctgaattccggtatggaaaaattgctgcataaagacaccgtcttttgggtggtgaaaccgcagattggtcgcgaagggattagcggcctgggaacgctgctgtctggagtttatatcgaactgcagccaggcgcgaaaggcagcaaaatggataaatacgatttgctggactcgccaccgttggccccgcctgatgcgaaaggtatccgtgtgattctcgatagcaaaaaagccgggcagctctcgccaggagatccggtgctgttccgtggctatcgggtaggttcggttgaaaccagcaccttcgatacacaaaaacgcaatatcagctatcaactgttcatcaatgcaccttatgaccgactggtgaccaacaatgttcgcttctggaaagatagtggcattgcggttgatctgacgtcagcagggatgcgtgtggagatgggctcattgacaacgctgctgagtggcggtgtcagctttgatgtgccggaaggtctggatttagggcagccagtggcaccgaaaacagctttcgttttgtatgatgatcagaagagcattcaggattcgttgtacaccgatcacattgattatctgatgttctttaaagattcggtacgcggtctgcaaccgggagctccggtagagttccggggtattcgcctgggtaccgtaagcaaagtgccattctttgcgccgaatatgcgtcagacatttaacgatgattaccgtattccggtactgattcgtatcgagccagagcggctgaaaatgcagcttggcgaaaatgcggatgttgttgagcaccttggcgaattgttgaaacgtggtttacgcggatcgctgaaaaccggaaacctggtcactggtgcactgtatgttgatctcgatttctatccaaatacgcctgcaataaccggtattcgtgaatttaatggttatcagattatcccgaccgttagcggcggcctggcgcaaatccagcaacgactgatggaagcgttggataagatcaacaaactgccattgaatccgatgattgaacaggcaaccagtacgctttctgaaagtcagcgcacaatgaaaaacctgcaaacgacgctggatagcatgaacaagatcctcgctagccagtcgatgcagcagttgccgacggatatgcagtcaacgttgcgtgaattgaatcgcagcatgcagggcttccagcctggctccgcagcctacaacaagatggtggcggatatgcagcgccttgatcaggtgttgcgagaactgcaaccggtgctgaaaacgctcaatgagaagagtaacgcgctggtatttgaagcgaaggacaaaaaagatccagagccgaagagggcgaaacaatgaaaaagtggctagtgacgattgcagcactgtggctggccggatgcagctccggcgaaattaataaaaactattaccagttacctgtggtgcagagcggtacacaaagtaccgccagccagggcaatcgtctgttatgggtagagcaggtcactgttcctgactatctggcggggaatggtgtggtttatcaaaccagtgatgtgaagtatgtgattgccaacaacaacttgtgggccagcccgttggatcaacagttgcgcaacaccctggttgccaacctgagtacgcaactgcccggctgggtggttgcctcccagcctctgggaagcgcccaggacacgctcaatgttaccgtaacggagtttaacggtcgctatgatggcaaggtcattgtcagtggtgagtggctgttgaaccaccagggacaactgatcaaacgtccgttccgtctggaaggagtgcaaactcaggatggttacgatgagatggttaaagtgctggccggtgtctggagtcaggaagccgcttctattgcacaagagataaagcgtctaccttaattataaagatttgtaaatataaccgtctccggtatgttgcctgaggcggtttttttgtctctaacgtgcggaaaaatttgttcctcttcacattttttgtacaaccgacatgcccgtgtagctcacaaatatgacagtggcgtgaattttgcgcattgacggcagttatgattcgcggtattgcttaactgtgattgcacatttagtaatcactgttttcttttccaccagaaaccagtatgagggaaacgaggcatgaagagacaaaaacgagatcgcctggaacgggcacatcaacgtggttatcaggccggcatcgccggacgctcaaaagaaatgtgtccctatcagacgctgaatcaaaggtcacaatggctgggaggctggcgagaagccatggcggacagggtagtaatggcctgattctgtctctttaaaaagaaacctccgcattgcggaggtttcgccttttgatactctgtctgattataatcagaaggcagacgtatcctggaacagaccgactttcaggtcgctggcggtatagatcagacgaccatcaaccagcacttcgccatccgccaggcccataatcagacgacggttaacaatgcgtttaaagtgaatacggtaggtcacttttttcgctgtcggcagtacctgaccagtgaatttcacttcgccaacgcccagcgcgcggcctttaccttcgccgcccagccagccgaggtagaaccctaccagctgccacattgcgtccaggcccaggcatcccggcataaccggatcgccaataaagtggcatccgaagaaccacagatccggattgatatccagttctgcttcaacataccctttgtcgaagttaccacccgtttcggtcattttgaccacacggtccatcatcagcatgttcggtgctggcaattgcgggcctttagcgccaaacagttcaccgcgaccagaggcaagaaggtcttcttttgtataggattcgcgtttatctaccatgttctctgtaagccttattttattgaagcacgcaggatagctaacacgtgtacgctgaacaagtccgatcagttcggaataaaccagttcagccaacgtaatggccatggaaaacggtgacgtccttcctgttgcgatgcttgcgcgatacgttcctggatggtttgcatcagcgtcgtttggccttcgccatcccacaccagatttaataataacggcagtgcgtcagtcacatcgtctactgcccagatggtgaatttgccttcttctaccgctttcaccagttcactgtgaagacttaaatggcgaacgttagctgtggggataatgacaccttgtttcccggttaactcacgttgctggcaaatagcaaagaagccttcgattttctcatttaaaccaccgaccggctgggcgcgaccgaactgatcgactgaacctgtgatagcgatactctgattcaccggcacatcggcgagggcgcttatcagggcgcagagttcagccatcgaggcactatctccatcaacttcactgtatgactgctcaaatgtcagcgatgctgagaaggggatctgttgctcaagctgtagttccgacatcaggaacgcttgcatgatcatcatccctttcgcatggatattgccgccaagctccgctttgcgttcgatgtcggtgaattcaccatcgccaatatgcacaacgcagctaatgcgagaaggttcgccaaaagcgcgtggatgacccggaaattcaatgaccgaaagggcgttaatttgcccgatgcgttcgccttcggtttcaatcaggatttgctcctgaaggatctcatcctgcatacgttcagcgaggaaaccttcgcgccattcacgctgctgcagcattaagtttagctgctcgccggagaaggtgtcgccatcacacagggaggcgacctctttacactggcggaggatccactgcgggctaagcggaagtgtttcttgttcaccggtgtagcgtgctgcttcgcggataagtatcggccaggcatccgctcccggtgcaggtaagtgattatgtctggcggtaaatgtcacccagcgacaccactgggttactgactccgcatcgacaatctgcagagtatcttcaaattcgctataaatagcctgctctgaaagctctggctccatctcctggaaatcagccaatgattcgcgttcgcctaccagaatgactttcagcttcaatggcatcgaaggcacagagacggggagagggcgcgactcatcaaacgcaacccagtcaaaacgctcgcggttaacgatatttttcagccgcatccacagcagaggttgcgccagcagtgtacgcaaagagataatgagaataccgccatttgcctgatgcaccagaccaggctgcagggtaatgtcgccattaaactggcgcaggcagccaaagagttgctccgcttctacccagtcggcagcgacaacttgcgttaaagtcgcaaaattatcatctgcactcactgcgtgacgtaagcggatggagtggccggaaacctcatagtgaccgcccaccagttggcctgcatcgctttgtagcgtacgcgcggcattggcaataagattcagatactcagactcttccggggccttcgccagcataaaagaggaggatgctcgcgtatgcagcaactgctccagcgcaaattgcagccgcggttgagtatcactgaataaaggatcgttttcgtcaatcaaatgtggctgagcaaatatttcctgatagctatcggtatcaggaaccaggtcacgccatgcaagtttcgtaatggtcaaagttgatgttttttagtctgttgtcaaagccgcgattataccgtaaccggcactacagcacacgtagaaagcaccgacaatactcctggcatgggcgttaaagctcacaggatggagattcttttcttcactggcctaaaaagctgatattctgtaaagagttacacggtaacattgagatcgctatgaaatatcaacaacttgaaaatcttgaaagcggttggaaatggaagtatctggttaagaagcatcgcgaaggggagttaatcacccgttacatagaagccagtgccgcccaggaagccgtcgatgtgttgctctcgctggaaaatgaacccgtgctggtaaatggctggattgacaagcatatgaatccggaactggtcaatcgcatgaagcaaaccattcgggcaagacgaaagcgccattttaatgcggaacaccagcatacgcgcaaaaaatcgatcgatctggaatttattgtctggcaacgtctggctggtcttgcgcagcgtcgcggtaaaacgctttctgaaacgattgttcagctgattgaagatgcggaaaacaaagagaaatacgcgaataaaatgtcttctctgaagcaggatctgcaggcattgctgggtaaggaataactgacgaaagtcagttcaatttactaaaggcaaaaaaaaccccgcagcagcggggtttttctaccagacgagaacttaagcctgcggctgagttacaacgtctttgatacctttaacttcgatctctacgcgacgatccggagccaggcagtcgatcagtgcagcacgctgtttcacgttgtcacaggtgttgccagtaaccgggttggattcgcccataccacgtgcggagatcttgtctgccgggatacctttggagatcaggtaatcaacaacagactgagcacggcgctcggacagaccctggttgtaagcgtcagaaccgatgcggtcggtgtaacccagaacaactacggaaccgtctttcggatccaggttgctcagctggctgtacagctgatccagagcagcctgaccttccggtttcagggttgctttgttgaagttgaacagaacgtcagacttcagagtgaagtgcttggtctgtacttccggtgccggagctggagccggagcaactactggagctgcttcgccctgaccgaaacggtaggaaacacccaggctcagcatgccgttgtccggacgagtgccgatggtgtgtgcgtcaccgatgttgttggtccactggtattccagacgggtagcgatttcaggagtgatcgcgtactcaacaccgccagcgaagaccggagaaacgccggtgtcgtggtttttaccataaacgttggatttagtgtctgcacgccataccatgccacccagacgagtgtagatgtccaggtcgtcagtgattgggtaacccagtttagcggtcagttgaacgccctgagctttgtatgcaccgttttcaacgctgcctttgtacggcatacgacctaaccagtcgtaacccatttcaaagccaacatacgggttaacctggtaaccaccaaaagcaccagcgcccagttggttttcatgggtcgggccattgttgttgatgaaaccagtgtcatggtactgggaccagcccagtttagcaccagtgtaccaggtgttatctttcggagcggcctgcgctacggtagcgaaaccagccagtgccactgcaatcgcgatagctgtctttttcattttttgcgcctcgttatcatccaaaatacgccatgaatatctccaacgagataacacggttaaatccttcaccgggggatctgctcaatattaactctaccgatatcttcggcttatgccgagcacccctggcgatgtaaagtctacaacgtagttgaaaacttacaagtgtgaactccgtcaggcatatgaaaaaaaagtcttgtataaggtatgtttaatcttttttgtcagcgacaatttacagaagagaatcgcggaaaccgcttcagacaagcctccgcaaggaaaattagtcacgactgaaagcattggctgggcgacaaaaaaagttccaggattaatcctaaatttacttaatgatacaaattagagtgaatttttagcccggaaagttgtctcgtggcgtgagaggatgcgcttaccggacgcataataaaccccatagcgttaccttcatttgccgcatcaacaagttcagcatgctcttcttcagtcaaatcatctgccaaccaaccgatcaccacactgtaattgcccgtgcgtaaagcgcgaaccattgactccacagtgtggcaaggggagagctggctaatctgcattactttcgttaagggtagcccagatgcctgaacccattcccgactcagtttttgttgcggtgttaaccagagttgccagcgcgattgctgaccgagttgctgtaacaatggcaacagtagaagttgcgtcatcatgggctgatcttcgcgatagacaacttcactgataagcccggctgtagtgttttccgtagagacacgcgcaattttacttgctgcggatgagaacgacgaagaacgatgtgcatagcctgaagtgtacataatcaatccagcccctgtgagttactgtatggatgtacagtacatccagtgacaacaaagatcaaccctattttcggaaagagcctcgcaaattttgtcgttggtgacgggaaaacataaattaatcttgccccttaagaataagttgcctattttcgtagttaacggatccgttaatgtgaatcattcttttatgttatgattttaaaaggaattttatgaaaagcctctcctataagcggatctataaatcacaagaatacctggcaacgttgggcacaattgaataccgatcattgtttggcagttacagcctgaccgttgacgacacggtgtttgcgatggtttctgatggtgagttgtatcttcgggcttgtgagcaaagtgcacagtactgtgtaaaacatccgcctgtctggctgacatataaaaagtgtggccgatccgttaccctcaattactatcgggttgatgaaagtctatggcgaaatcaactgaagctggtgcgtctgtcgaaatattctctcgatgcagcgctgaaagagaaaagcacgcgcaatacccgggaaagactgaaagatttgcccaatatgtcttttcatctggaagcgattctcggggaggtggggattaaggatgtacgggcgttacgtatacttggggcaaaaatgtgttggttgcgactgcggcagcaaaacagtctggtgacagaaaagattctgtttatgcttgaaggtgccattatcggcattcatgaagctgcgctcccggtggcacgccgccaggagcttgcagaatgggctgactctcttacgccgaaacaggagtttcctgcggaacttgagtaatctggcgttgcagacgaccaatctcaggcagtaatgcaatcaataatccaacttgttgtacgaccagaggttctttgctgtctgcccgtggttcaagttgctgcatccgctgtttcaggctagctaatgcctcattgacgcgttcttcatcagcaggttgatgatgtaacgcgtcatcaacatagcaaactgcgtcatcaagaaacgccagaatttcaggattagttaactgctcccggtgagcaccgagggctgagatatagctggtaaacgtatggttaaggcacagcaaccgaaacgcggcttcgcgaatttgcggggtaacgttcggctcgctggacatatttgataccaccgacgccagctcagcatcacggttgtgtgcatcgcggcgggcaatacgatacgccagacggttatcacgcccctgatggtattgctccagtatggcatcgagataccgacagttggcctctgtggcgcgttcgagcatgcgcggcagattgcgaaactgccagtcaggccagatgtagctcactgccgcccacgcaatggcacaaccaatcagcgtatcgattacgcgaggtaacgctacttcaaaaccttcacccagtaagttaaaacacagtagcaccaaaagtgtgatgaacatcgttgcatgagcgtattgcacgttacggaaggcaaaaaagagcacgccggtaataaccagcagcaccagctgcccttccagtgatggcacaaaccacagcacaggaatgccaatggcgatacctaccagcgtaccaataatccttaacttcaggcggtggcgcgtggcgttatagtttggctggcagacaaacaaacttgtcagcaagatccaatacccgtgatgcattccggttatctgaatgatggcgtagccgaagcacaacaccagcgacattcttaccgcatgacggaagagggcggattccggcgtgaagtgacggctaagacgcagccagatatcactcaacccgtgcgggctgtcatcagcgagctcattttcgtcattattatggggtagtgcctgggcctgttctgattcaattgttgccagttgggcatcaatggcgcgtaaattgttcagcaaaaatcccagtgttttgagtaaatcggcgggtgcgccgttatcgcgcatccgctccagcgcagcatcaatatgcgtaaaagcgcgctcaaaatgcggatcatgttgataaggctgacgcaacaaaatacagcgtgacagttgctggcacgcctggccctgcatcgacatcagccgctgaaaacggaacagcacgtcgctgtggcgaaaatgttcacgcaatgtttgatactgaatatgagaagagctggcacgctcgtgaatatcctgtgcgacaaagtaataatgcagcgtgcgacgcgttccccgttgaccacgatcgccacgtaagcgggtcagcagcgagagtttcgtctgattcaatgtcgccatcagcagaccgttggcgagagccaaatcgtacagcggtgcctggctttgatcttcaatatcaggatcaaacatgcgcgacttgagctcaagataacgcgccagttgttcatagcaacgcgccaggttgtcctgcagcgggcggaccgggaacagcagatgaccaataagtgtcaggacgttgtaccagacggcaccggccagcagatacatcggctgctgataccagtgctcatacagtgatgttcccaacatagtgtaaatggcgatcagcaatgcaccgaaggcaattgttgcatagcgttgacccagaccgccgagcaaaatgaagccgctggtagagagcgttaagccaatcgcaaatagccagggccagggaaacagcaattctactgaggccgaggcgataaaaaagcagaacagcgtaatgatgaggttacgcaaacgtcccgccagtcggtcatcgagatcggtcagcgccgctgccaccatccccagcgttagcggaatcgtcagttttacatcacccagccaccacggaaacgctgtggttccacaaagcgcaataaaaatacgcgcgtaatacagccaggcgctgttccaggtatagcgtttgagcaaaggacttagcataaaggccatattagtggattattcaaaacgacgacgtgcattggcttcacgcgcagcttgcgctgtttctaccgataccacgcgacgaccaaccggccatagtgcaatagcggcaattttaaagttcgcaatgccgacaggaatgccaatgattgaaatacattgtgcgatgcccgttgcaatgtgcatcaggcataaccaccagccaaagaaaatcagccagaaaatattcaataccgtaccgccagtattcagcagcacatttttgccagccgggttcagttcatcgacatgaatagcttcattgccataaggcaccagagacagtttagtgatctcccagcaggatcgtgtcagcggtaaggtaaaaatcagcacaatactgaccagagtcgccaacagccagcccagagtggtggcaaatccgccaagcacaaagttcagaatgttcaaaacggtacgcataaaacctcgctttactgtggttttcagtaatgggcggcaattgtaacgtttttttgggctggagcacgttttctctgacggttacactgataagaaataatttcgtgtggatctacagagtcatggaactgaaagcgacaacgcttggaaaacgtctggcacagcacccttacgatcgggcggtgatcctcaatgccgggattaaagtctccggcgatcgccacgaataccttattcctttcaatcaattactggcgattcactgtaagcgcggtctggtatggggcgagctggaatttgtactgccggacgaaaaagtggtgcgtctgcacggcaccgaatggggcgagacgcagcgtttttaccatcatcttgatgctcactggcggcggtggagtggcgagatgagcgaaattgcgtctggtgttttacgccagcaactggatttgattgccacgcgcactggggaaaataaatggctgacgcgtgagcaaacctctggcgtgcagcaacaaatccgccaggctttgtcggcgttgccgttgccggttaaccgactggaagaattcgataactgccgtgaggcgtggcgtaaatgtcaggcctggttgaaagatattgaaagcgctcggttgcagcataaccaggcgtataccgaagccatgcttaccgagtatgcggattttttccgccaggtcgagtcttcaccgctgaatccggcgcaggcccgggcagtcgttaatggcgagcattctctgttagtgctggcaggtgcaggaagcggaaaaacgtcggtgctggtggcccgtgcaggctggttgctggcgcgtggtgaagcgtcccctgagcaaattttattgctggcgtttggtcgcaaagccgctgaagagatggacgagcggattcgcgaacggctacataccgaagacattaccgcacgcacgtttcatgcgctggcgctgcatattattcagcagggcagcaaaaaagttccgatagtcagcaaactggaaaatgataccgctgcccgtcatgaactctttattgctgagtggcgcaagcaatgcagcgaaaagaaagcgcaggcgaagggctggcggcaatggctgacggaagaaatgcagtggtcagtgccagaaggtaacttctgggatgatgaaaaattacagcgtcgccttgcctctcgcctcgatcgctgggtaagtctgatgcggatgcacggtggtgcacaggcagaaatgattgccagtgcacccgaagagattcgcgatctgttcagtaaacgtatcaagttgatggccccgttattaaaagcctggaaaggtgcgctgaaggcagaaaacgctgtcgatttttcgggccttattcatcaggcgattgtgattctggagaaaggtcgctttatcagcccgtggaagcatattctggttgatgaatttcaggatatctcgccgcagcgggcagcgttgttagcggcattacgcaagcaaaacagtcagacgacgttgttcgctgttggtgatgactggcaggcgatttaccgattcagcggtgcgcaaatgtcgctcaccaccgctttccatgaaaactttggtgaaggcgaacgctgtgatttagacacgacttaccgttttaacagtcgtatcggtgaggtggcaaaccggtttattcagcagaacccaggccagctgaaaaagccgctaaacagcttaaccaatggagacaaaaaagccgtcacgttattggatgagagtcaacttgacgctttgctggataagctctctggttatgccaaaccggaagagcgcattctgatcctggcgcgttaccatcacatgaggcctgccagcctggaaaaagcggcaacacgctggccgaagttgcaaatcgactttatgaccattcatgccagcaaagggcaacaggcggattacgtcatcatcgttggcttgcaggagggaagtgatggttttccggctgcggcgcgggagtcgattatggaagaggcgctactgccaccggttgaggatttcccggacgctgaagaacggcggttaatgtacgtggcgctgacccgggcacgccatcgggtatgggcactgtttaacaaagagaatccctctccctttgtggaaatactgaaaaatctggatgtgccggtggcgagaaaaccgtaagaaacaggtggcgtttgccacctgtgcaatattacttcagacggtccgcgagataacgctgataatcggggatcagaatatcgaccgcgtcgttgaaatgcggcgactggattatgaagtctgccgttgccacgttggtggcgaccggaatgttccataccgtcgccagacgcagcaaggctttcacgtcaggatcgtgcggcacggcatttagtggatcccagaagaaaatcaatacatcaattttcccttctgagatcaatgcgccaacctgctggtcaccccccattgggccactcaacatcgcgttgacgttcatgccggtcgcgcgggaaattaagttaccggtagtgcctgttgcatacagtacgtgttgttccagtaacggttgatgccgttccacccagctcatcagcatttgtttgcagtgatcgtgtgccaccagcgcaatatgtttccgcgcaggtaaagtgcgagtcgtcagttccataatgtacatccgtagttaactttcctacagattactgtaagcacttatcgctgcaagataaagaccgaaaaagcctgcgcacaggcacaaaaatctcaggaagatggttgtttttccgcccactgcaggaaagtatttcgcgtttgtgggtcagccagtttaaaccaatacttcagccgttgttctgtgagcacctgagactgcggtggaatagcatccagctcggaaacacccgaaagcagcgtactgtcatctgccatcatcgtggcaaattgcggtagtgaagcgcgtttcgcggatttgttatagcgttcaacctcgacctcataatcaatcgtttttgccgttgaggtaatggcgagaatatccagctttaccggaatcggcgtcgcatcgccatccaacaattcaaggcgcggcgcggcatcaaaatggttagcttcccgctcattctccaggcgaggcaggcgaaaattgacctggttgatgagctgggtattaaaactgaccaccagcggtggggagatatacagccgttcttcactattggaaagatgaatcgtcttctcaacgcgaaacactaactgatgcggtccattatccagttcaatgctgtccgcaccgcgcagcagagagctggaaaccttcttgccgtcgagtaccagaagatcgacatcggttgaaagccgcagcgtggtggcaaaaacggataccggcaaacataatgcaatcaaggtggtcacgatgccggttttcataggtagctcctgtcaaaagaccgcccgaataataatgtgtcaaaatttttctttaatcatacttactaacatatagacatatttcccgcttttgctctcattcattcgtattagctgcatggttggcatgtcggctttgtcgtacactttgttaaacagtctggaggaaataatgaaagaaaccgatattgcaggcattttaacgtccactcacaccattgcgctggtgggggcaagcgacaaacccgatcgtcccagctatcgcgtgatgaaatatctactcgaccaggggtatcacgtcattccggtttcgccaaaagttgccggcaaaacgctgctgggccagaaggggtatggcacgctggcagacgttccggaaaaagtcgatatggtcgatgttttccgtaattcagaagcggcgtggggcgtggcacaggaagctattgccattggcgcgaaaactctctggatgcaactgggggtgattaatgagcaagcggcagtactggcacgggatgccgggttaaatgtggtgatggatcgctgcccggctattgagatccctcgcctgggcctggccaaataaaaaatccccggaaggcaaaaaccttccggggatttgttcagggattagttacgcagacgcggggcctggagttgtttgcggatggtctgcgccagctcatccatggatggctgttcaggatgttcatcctgcaattcgctacttagctgggcttcagccaggtaggtatgaaccggtaggccgttatcgtcctccatcactacgtgataccacggagcggcgcgaagctcgtcattcaccgccagctcatcaggcgacggttcagagagcgaataaaccgggtcgatatccacgaccactccgagataacctaacagggaatggcggacctgctggccgataccgaatttgctggcaatcatagtcacctcccgggaaatctttacctttgatataagggtaaaattccacatttcaagttacatgacgcgacaggcaaaccctttcagatatagcccttccggataggtagcgatcaccggatgatcggctgcctgacggaactgctctataaattgtacatcacgaccggcatcaattgcggcatccgcgatgattttctgaaataaatcgctggtcatcagaccggaacaggagaaagtcaggagaataccgccttcattcagcagctgaatcgccagcatgttgatgtctttataaccacgacacgcgcccatcaactggcttttattctcaacaaacttcggcgggtccatcacgataacgtcaaatttttcaccgcgatcgcgataagtacgcagcaatttaaagacatcatcacggacaaactcagccttgctcagatccagtttgttcagctcaacgttctgccgtgcaatatccagcgcttcctgggaggtatcaacgctgacaacctggctgcaaccgcccatcagtgccgatacggcgaaaccaccggtataggagaaacagttcagcacacgtttattttcaacgtagcggcgggtagccaggcggctatcacgctggtccaggtagtagcccgttttgtgtccgtgctgaatatccaccagcagtttcattccgtgttcttcaatcggcagcagggcaggtggcaactcgccggtgacggggccctgggtcagctccattccttcttttttacgtaccgcgacgtcgctgcgatcgtaaatcgaacattccgggtacagcgtttgcagggcactaattaatgccgcgcgctgatattctgccccagcactcagcagttgcagcaccagaaaattaccgaaacgatcgatagtaatacccggcaggccatcagattctccggcgattaaacgatagctgtcgaggccatctttttgcgccagccagtcacgccatttttgtgcttgttgcaaacggcgggaaaaaaaagcaatgtcgatagactcagacgggtcaaacgtccagacgcgcgcccggatttgcgaagctggcgaataagcgccgcgtgctaaccattttccctgatgatcaacaatatcgatggtttcaccgaggctggctttaccttccatgcgggcaacggccccggaaaagacccacggatggcgacgaagtaatgatttttcgcgccctttggctaacactaaacgtacactcataatttacttttctgtcgatgcaaagaaatgggcgtcattgtccggagttttccatggatttgcaacgcgtccattaaggataaggagagcagcaatgtcgaaagtctgcataattgcctgggtttacgggcgagttcagggcgtaggatttcgctacaccacacagtacgaagcgaaaagactgggtttaaccgggtacgccaaaaatcttgacgatggcagcgtggaagtggttgcttgcggtgaagaagggcaggtggaaaaattaatgcagtggttaaagagtggcggcccgcgttctgcgcgtgtagaacgggtgctcagcgagccgcatcatccctcgggggaattaaccgattttcgtatccgttaaatacattttaccggttttggcaggccagcaattttggtggcttgcttagccggacctttcggaaacagtcggtataaatagcggctgttacctttttcttcgccaaatttattcgccatcgcttttaccagcatacgaatcgccggagaagtattgaattccagatagaaatcacgcacaaaacgcaccacttcccagtgttccggtgacagcgaaatcccttcgttctctgcaatcaccacagccagcggctcactccactggctgctttctttgagatagccttcggtatccgtttctatctctttaccttcgaagatcagcataattattactaccttaatcagactggcggcagtgtaacaaaaaacaaagccccgcataaagcgaggctatgaaagtgttagcgggtgagattaatcgcggctagcgaagcccagaatgctcagcaggctgacgaagatgttgtacagcgaaacatacaggctaaccgtggcacgaatatagttcgtctcaccgccatgaatgatgttgctggtttcaaacaagatagcgccagaggagatcagaatgaagaccgcgctgatcgccagatgcagagcaggcagctgcaggaagatattcgcaaccataccaatcagcaccaccacaatacccgccatcagcataccgccgaggaacgacatatctttgcgggtggtcagcacatatgcagagcagcagaagaacactaacgccgttccgcccagtgccatagcgattacgtcacccattccggcagacagataggtgttcagaataggtccgaggatataacccagaaaaccggtaaaggcgaatgcggagataatcccggtcggcttattcgccgttttataggtcaggaacatcaaaccatacatacccaccagcgtcagaatcagacccggagatggcagcatcagcaccgtactggcagttgcggtaatcgccgaaaaggccagcgtcaggctcagcagaaaataggtattacgcagcaccttatgggtgctaagcagtgatgtacggtcatgtgaagaactaacaatacgatccattgagtcactctctatgacagatgtaattaattaagcagcataatgataatgcgtaagggcacccagaagttttacccatctttacgcatttgatctggaacaggtttaacagcggattatcaggtcattaagcaaatataacgccctgagaatttcgacaggcaaaagaaaaaggggttagcatttagctaaccccttatcttatttggcggaagcgcagagattcgaactctggaaccctttcgggtcgccggttttcaagaccggtgccttcaaccgctcggccacacttccggaatgacgcgcactataaacatcccgatgcggcgtgtaaacccctaatttgtttgtttgcctgaaaaacagccaaaagtgcattgatagcgtgaaataacagcagattgatcatttcatcaccatgaattccttctcttttactcgtttagcaaccggctaaacatccccaccgcccggccaaaagaaaaataggtccatttttatcgctaaaagataaatccacacagtttgtattgttttgtgcaaaagtttcactacgctttattaacaatactttctggcgacgtgcgccagtgcagaaggatgagctttcgttttcagcatctcacgtgaagcgatggtttgccttgctacagggacgtcgcttgccgaccataagcgcccggtgtcctgccggtgtcgcaaggaggagagacgtgcgatatgaataacgaggaaacattttaccaggccatgcggcgtcagggcgttacccggcgcagctttctcaaatattgtagtctggctgccacgtcgctgggattaggcgcgggaatggcaccaaagattgcctgggcgctggagaacaaaccgcgcattccggtggtatggatccacggtctggaatgcacctgctgtaccgaatcttttatccgctccgctcacccactggcgaaggacgtcatcctttccctgatttccctcgattacgacgatactttgatggctgccgccggaacccaggcggaagaagtctttgaagacatcatcacgcaatacaatggcaaatatatcctcgcagtagaaggtaatccgccgctgggcgagcaggggatgttctgtatcagcagcggtcgaccgtttattgagaaactcaaacgtgccgctgccggagccagcgcgattatcgcctggggaacctgcgcgtcctggggctgcgtgcaggccgcgcgacccaatccgacgcaggcaacgcctatcgacaaagtcatcaccgacaaacccattatcaaagtacctggctgcccgccgatcccggatgtgatgagcgccatcattacttacatggtgacctttgatcgcttgccagatgtcgacagaatgggccgtccgctgatgttctatggtcagcgaatccacgataaatgctatcgccgcgcccacttcgacgccggagagttcgtccagagttgggatgatgacgctgcccgcaaaggttactgcctgtacaaaatgggctgcaaagggcctaccacctataacgcctgttcctccacacgctggaatgatggcgtttctttcccaatccagtctggtcacggctgcctgggctgtgcggaaaatggtttctgggatcgcggttcgttctacagccgcgtggtcgatattccgcaaatgggtactcattccaccgccgataccgtcggtttaaccgcgcttggcgtggtggcagcggctgttggtgtgcacgcagtcgccagcgccgttgaccagcgcagacgtcataaccagcaacctacagaaaccgaacatcagccaggcaatgaggataaacaggcatgagcactcagtacgaaactcagggatacaccatcaataatgccggacgccgcctggtggtcgacccgattacgcgcatcgaaggccacatgcgctgcgaagtgaatattaacgatcagaatgtgatcaccaatgccgtctcctgcggcaccatgtttcgcgggctggagatcatcctacaagggcgcgacccgcgcgatgcgtgggcgttcgttgaacgtatctgcggcgtctgtactggcgtacacgccctggcttcggtttacgccatcgaagatgctatcggtattaaagtgccggacaacgccaatatcatccgcaacattatgctggcaacgctctggtgccacgatcatctggtgcacttctatcagcttgccgggatggactggatcgatgtgttagatgcgctgaaagccgacccgcggaaaacctccgaactggcgcaaagtctctcctcttggccgaaatcatcccctggctatttcttcgacgtacaaaaccgcctgaaaaaatttgttgaaggcgggcagttggggatcttccgcaatggctactgggggcacccgcagtacaaactgccgccagaagctaacctgatgggctttgcccactatctcgaagctctcgatttccagcgtgaaattgtcaaaatccacgcggtctttggcggtaaaaacccgcatccaaactggattgtcggcgggatgccttgcgccatcaacattgacgaaagcggcgcggtcggggcagtcaatatggaacgcctgaacctggtgcagtcaattatcacccgcacggcggacttcattaacaacgtgatgatccccgacgccttagccatcggtcagttcaacaaaccgtggagcgaaatcggcactggtctttctgataaatgcgttctcagctacggcgcattcccggatattgccaacgactttggcgagaaaagtctgctgatgcctggcggcgcggtgattaacggcgacttcaacaatgtgctgccagtggatttggttgatccgcagcaggtgcaggagtttgtcgaccacgcctggtatcgatatcccaacgatcaggtcgggcgtcatccgttcgatggcatcaccgacccgtggtacaaccccggcgatgtcaaaggcagcgataccaacattcagcagctgaatgaacaggaacgctactcgtggatcaaagcgccacgctggcgcggtaacgcgatggaagtggggccgctggcgcgcacgttaatcgcttatcacaaaggcgatgctgcgaccgttgagtcggtcgatcgcatgatgtcggcgttgaacctgccgctttccggtatccagtcaacgttaggccgcattttgtgccgcgcgcacgaagcgcagtgggccgcaggtaagttgcagtatttcttcgacaagctgatgaccaacctgaaaaacggcaatctcgccactgcttccacggaaaaatgggaacctgcaacctggccgacagagtgccgtggtgtcggttttaccgaagcgccgcgcggggcgttaggccactgggccgccattcgcgatggcaagattgatctctaccagtgcgtggtgccgaccacctggaacgccagcccgcgcgatcccaaagggcagattggcgcttatgaagcggcgctgatgaacaccaaaatggcgatccccgagcaaccgctggagatcctgcgtactctgcacagctttgacccgtgcctcgcctgttcaacacacgtgctgggcgacgacggtagcgagctgatctccgtgcaggtgcgttaacagcgaaggagaatcatcatgcaacagaaaagcgacaacgttgtcagccactatgtctttgaagcgccagtgcgcatctggcactggttgacggtgttatgcatggcggtgttgatggtcaccggatactttatcggcaagccgctaccttccgtcagcggcgaggcgacgtatctgttctatatgggctacatcaggttaattcacttcagcgccgggatggtttttaccgtggttttgctgatgcggatctactgggcttttgttggcaatcgatactcccgcgagctgtttatcgtgccggtatggcgtaaaagctggtggcagggcgtgtggtatgaaatccgctggtatctgtttctggcaaaacgtccgagtgccgatataggccataatcccatcgcccaggcggcgatgttcggctatttcctgatgtcggtctttatgatcatcactggttttgcgctgtacagcgaacacagccagtacgctatttttgcgccgttccgttatgtggtggaatttttctactggacgggtggcaactcaatggacattcacagctggcatcggctggggatgtggctgattggcgcgtttgtgatcggtcatgtctacatggcgctgcgtgaagacatcatgtccgacgacacggtgatctccaccatggtcaacggctaccgtagccacaaatttggcaaaataagtaacaaggagcgttcatgagcgagcaacgcgtggtggtcatggggctgggcaacctgctgtgggccgatgaaggcttcggcgtgcgggtggcggaacggctgtatgcccattaccactggcccgagtatgtggagattgtcgatggcggtactcagggactgaacttgctggggtatgtcgaaagcgccagccatctgttgattctcgatgccattgactacgggctggaacctggaacgctgcgaacctatgccggagaacgcattccggcttatctcagcgcgaagaaaatgagcctgcatcagaacagtttctccgaagtgttggcgctggcggatatccgcggacatctgccagcacatattgccctcgtcggtctgcaacccgcaatgctcgacgactacggcggtagcctgagcgaactggcacgggagcaactgcccgctgcggaacaggcggcgctggcgcagcttgctgcgtggggaattgtgccgcaaccggctaatgaatcgcgctgtctcaattatgactgtctgtcgatggaaaattacgaaggcgttcgcttgcgccagtaccggatgacacaggaggagcagggatgagcaacgacacgccatttgatgcgttgtggcaacgaatgctggcgcgcggctggacgccagtcagtgaatcccgtcttgacgactggcttacgcaagcgccagacggcgtggtgttattaagcagtgacccgaaacgcacgccagaggtcagcgataatccggtaatgattggcgaattactgcgcgagtttcccgactatacatggcaggtggcgattgctgaccttgagcagagcgaagccatcggcgatcgctttggcgtctttcgctttcctgccactttagtgtttaccggcggaaactatcgcggcgtgctgaatggtattcacccgtgggcggaactgataaacctgatgcgcgggcttgtcgaaccgcagcaggagcgtgcctcatgagcgaaacttttttccatctgctggggccaggaacgcaaccgaacgatgacagtttcagcatgaatccactgccgatcacctgtcaggtgaatgatgaaccgagtatggcggccctggagcaatgtgctcacagcccgcaggtgattgcgctgttaaacgagttacaacatcaactaagcgaacgccaaccgccgttgggcgaggtgctggcagtcgatctgttaaatctcaacgccgacgatcgtcactttatcaatacgcttctcggggaaggggaagtgtcagtgcgcattcagcaggctgacgacagtgaaagtgaaatacaggaggcgatcttctgcggattatggcgggtgcgcagacgtcgcggcgaaaagttgctggaggacaaactggaggctggctgcgcgccgctggcgttgtggcaggcggcaacgcaaaatctcttgccgacagattcgctgttaccgccgcccattgatggcctgatgaatggcctaccgttggcgcatgagttactggcacatgtacgtaaccccgacgcgcagccgcacagcattaatctgacgcaattacccatcagcgaggctgatcggctttttctctcacgtctctgtgggccgggaaatattcagattcgtaccattggctatggcgagagctatatcaacgccacggggttacgccatgtctggcatttacgctgtacggacaccttaaaaggcccgttactggaaagttatgaaatctgcccaataccggaagtggtgctggcagcgccagaagatttggtcgactctgcgcagcggcttagcgaggtatgtcagtggctggcggaagctgcaccgacgtaaaaagacggtaagtatcgctttcagtcttatgaatatcgcaatcggcgaatacctctggtcgtagagtttcaggataaagagggagatctaccattatcgggttatttttctctcttcgcctacaggagtgcgcatgtgggatgtcattgatttatcgcgctggcagtttgctctgaccgcgctgtatcactttttatttgtaccccttaccctggggctgatttttttgctggctattatggaaaccatttacgtggtcaccggcaaaacaatctaccgcgatatgacgcgcttctggggtaagctcttcggtatcaattttgctcttggcgtggctaccggcctgaccatggagtttcagtttggtactaactggtcattctattccaactatgtgggcgatatttttggcgcaccgctggcgatggaagcattaatggccttcttcctcgaatccacctttgtcgggctgttcttcttcggctggcaacggctgaataaataccagcacctgctggtgacgtggctggtggcgttcggttcaaatctctctgcgttgtggatattgaatgccaacggttggatgcaatacccgaccggtgcgcattttgatatcgacaccctgcgtatggagatgaccagcttcagcgagctggtctttaatccggtcagccaggtgaaatttgtgcacaccgtaatggcgggctacgtgaccggggccatgtttattatggcgatcagcgcctggtatttactgcgcggacgggagcgcaatgtcgcattacgctcgtttgccatcggttccgtcttcggtactctggcgattatcggtaccctgcaactcggagacagttctgcgtatgaagtcgcgcaagtacaaccggtaaaactggcggcgatggaaggggagtggcaaacggaacctgcacctgcaccgttccatgtggttgcctggccggaacaggatcaagagcgtaacgcctttgccctcaaaattcccgcgctgctagggatcctcgccactcactcattagataaacccgtgccgggtctgaagaatttgatggctgaaacctacccacgcttgcaacgcggacgtatggcctggctgttaatgcaggaaatatcgcaaggcaatcgtgagccgcatgtgttgcaggcattccggggactggaaggtgacctgggctacggcatgttgctctcccgctatgcgccggatatgaatcatgtcacagccgcacagtaccaggcggcgatgcgtggcgcgatacctcaggttgcgccggtattctggagtttccgcatcatggtgggctgtggttccctgctgctactggtgatgctgattgcgcttgtccagacgctgcgtggcaaaatcgaccagcatcgctgggtgctgaaaatggcgctctggagtttgccgttgccgtggattgcgattgaagccgggtggtttatgaccgagtttggtcgtcagccgtgggcgatacaggacatcttaccgacatactccgcgcactccgctttaaccacaggacaactggctttctcactgatcatgatcgtagggctttacaccctgttcttaatcgccgaagtctacctgatgcagaaatatgcccgtctggggccgagcgcgatgcagagtgaacaaccgacgcagcaacaggggtaaaggagaaaatcatgtttgattatgaaacattgcgcttcatctggtggctgctgattggcgtgatcctggtggtctttatgatctccgacggatttgacatggggatcggctgtctgctgccgctggtggcgcgtaatgatgatgaacgccggatagtgataaacagcgttggtgcacactgggaaggcaaccaggtctggttgatcctcgctggtggggcattatttgccgcctggcccagagtgtatgcagcggcgttttccggcttttatgtggcgatgatcctggtgctgtgctcactgttcttccgcccgctggcctttgattatcgcggaaaaatcgccgatgcacgctggcgtaaaatgtgggacgccggtctggtcatcggcagtctggtgccgccggtagtcttcggtatcgccttcggcaacttgttgctcggcgtgccgtttgccttcacaccgcaattacgcgtggagtatctcggcagcttctggcaactgctgacgccattccctttattgtgcggattgctcagccttgggatggtgattttgcaaggtggcgtctggttacaactgaaaactgttggtgtgattcatctgcgttcacagctggcgaccaaacgcgctgcactgttggtgatgctgtgctttttgctggcgggttactggctgtgggtcggtattgatggctttgtactgctcgcccaggatgctaacggtccttccaatccgttaatgaaactggtggcagtgctacctggtgcctggatgaataattttgtcgagtcgcccgttttgtggatcttcccgctgctgggattcttctgcccattgctgacggtgatggcgatttatcgtggtcgcccgggttggggatttttgatggcatcattgatgcaatttggcgtgattttcacggcaggcatcacgctgttcccctttgtcatgccgtcaagcgtgagtccgatctccagcctgacgttgtgggacagtacttccagtcagctgacgctgagcattatgttggtaatcgtgctgatatttttgcccattgtgttgctctacactctctggagctactacaaaatgtgggggcgcatgacaacagaaactctccgccgtaacgaaaacgagttgtactaaggagcagaaacaatgtggtatttactttggttcgtcggcattttgttgatgtgttcgctctccacccttgtgttggtatggctggacccgcgtctgaaaagttaacgaacgtaggcctgatgcggcgcattagcatcgcatcaggcaatcaataatgtcagatatgaaaagcggaaacatatcgatgaaagcgatcttaatcccatttttatctcttctgattccgttaaccccgcaatctgcattcgctcagagtgagccggagctgaagctggaaagtgtggtgattgtcagtcgtcatggtgtgcgtgctccaaccaaggccacgcaactgatgcaggatgtcaccccagacgcatggccaacctggccggtaaaactgggttggctgacaccgcgcggtggtgagctaatcgcctatctcggacattaccaacgccagcgtctggtagccgacggattgctggcgaaaaagggctgcccgcagtctggtcaggtcgcgattattgctgatgtcgacgagcgtacccgtaaaacaggcgaagccttcgccgccgggctggcacctgactgtgcaataaccgtacatacccaggcagatacgtccagtcccgatccgttatttaatcctctaaaaactggcgtttgccaactggataacgcgaacgtgactgacgcgatcctcagcagggcaggagggtcaattgctgactttaccgggcatcggcaaacggcgtttcgcgaactggaacgggtgcttaattttccgcaatcaaacttgtgccttaaacgtgagaaacaggacgaaagctgttcattaacgcaggcattaccatcggaactcaaggtgagcgccgacaatgtctcattaaccggtgcggtaagcctcgcatcaatgctgacggagatatttctcctgcaacaagcacagggaatgccggagccggggtggggaaggatcaccgattcacaccagtggaacaccttgctaagtttgcataacgcgcaattttatttgctacaacgcacgccagaggttgcccgcagccgcgccaccccgttattagatttgatcaagacagcgttgacgccccatccaccgcaaaaacaggcgtatggtgtgacattacccacttcagtgctgtttatcgccggacacgatactaatctggcaaatctcggcggcgcactggagctcaactggacgcttcccggtcagccggataacacgccgccaggtggtgaactggtgtttgaacgctggcgtcggctaagcgataacagccagtggattcaggtttcgctggtcttccagactttacagcagatgcgtgataaaacgccgctgtcattaaatacgccgcccggagaggtgaaactgaccctggcaggatgtgaagagcgaaatgcgcagggcatgtgttcgttggcaggttttacgcaaatcgtgaatgaagcacgcataccggcgtgcagtttgtaatgcataaaaaagagcattcagttacctgaatgctctgaggctgatgacaaacgaagaactgtctaatgcgtagaccggaaaaggcgttcacgccgcatccggccactttcagttttactctttctcggagtaactataaccgtaatagttatagccgtaactgtaagcggtgctggcgcgtttaatcacaccattgaggatagcgcctttaatattgacgcctgcctgttccagacgctgcattgacaaactcacctctttggcggtgttcaagccaaaacgcgcaaccagcaggctggtgccaacagaacgccccacgaccgcggcatcactcaccgccagcatcggcggcgtatcgacaatcaccagatcgtaatggtcgttcgcccattccagtaattgacgcatccgatcgcgcatcagcagttcagacgggttaggtggcacctgaccgcgagtaatcacatcaaagcctcctttgccaaaatgctggatcactttgttgagctcatctttacctgccagatattccgacaagccatgttcattactcacggtaaacaggttatgcgaataaccacggcgtaagtcggcatcaataaataacactttttgatcggactgggcgatcaccgctgccagagttgaactgacaaacgttttaccactgtctggcgtcgcaccggtgatcattagaatgttattctccgtctccatcatagcgaaatgcagactggttcgtagcgcacgtacggcttccacagcagaatccgccgggttatccaccgccaggaaggggatatttttagtacgatggcgctgctgattagaaaataaatttttcttacgcagacgggtgcgtttatccagccactcggacattgggatagtggcataaacgctgatgccgtgctcttccagttgttccggggcttctacaccacgacgcaacatcgcacgcgccagcacggcacccacagaaataaacaggccaagaataaaaccaagcaccacgttcaacgcttttttcggtttcactggctgcggctgagtgactgccgggtcgataatccgcacgttaccaatggcactggatttcgaaatactcaactcctgctggcggttaagtaattgcagatataccgcacggcccgcttctacgtcacgacttaaacgcaacacttcctgttgggtggaaggcattgccgatacccgcttattcaggcgtttgcgttcttgctccagcgtctggcgtttttccagcagcgcacgataagttgggtgatctttcttatacagctgggagatctctgcctcgcggaaggtcagctcattgagttgattatcaacgttcacaatctgctcaagaacggctttggcttccaggttaaggtcaaccgaatcgcgctgctggcgataaacgttgagtttttcttccgcttggtccagctcgctgcgcacttcaggtaactggcgctgtaagaattcaaggctttgtgaatcctgcgccgcctggcgagcgatattctgttgcaaatagttgttagcgatgctgttcagaatacgagtaatcaactggggatcatcaccagtcatggtaagttccagcatcccgctttctttactgcgttcgctaacggtaaaggtttcctgcaatgcgttaatcgcttccagttcggtacgctggctcaggacaaactgtgttcctggtttggccttaatgtccgcgatagtcagcgcaacgccatctttttccagacgctggccgaccataccattgacggtgaactcttcaccttccagtgtatagtggccgttttccccaaccgtgagtgtcagttgctgatcctgaccattcagttgtggaatatgcatccagctgatcgccagctcacctggtttttctttggttaatctcgcccagccgcgacccacaatcggaaaatacttctgctcaactatgtcgcgcagattcagttcagcaatggttttaccgagaatcatgcgcgattgcagcagttggatctccggtgcagactcgggcgatgagttagggatcatatcgctcaggccgctgagaatggcgttgccctgtttttgctcaacctggaccagagtatctgcctgataaattggtgtgcttaacagcgagtaagcgacagcgatcagcgtgaataacgcggtcacgctgataataaacttacggtgatcccataactcgccgaccagacgaagcagatcgatctcattttcctgagtgctgcctggtggcgtattcatatttttagttgtcatcgtattttataaactcaaattaccggctgaggcgcttcgcccattcctgactggcgcgctccaacataccgtagacatgttcaaatgcgtcctgacttttacgatagggatccgggatctctttctgttccagccattgcccaaacagcattgtcttcccgcggacctcgggagcaattgcggtaacctgagcaatatgttccgactccattgccagaatcagatcgtaatttcgtgccatctcagcagtgagcttacgtccggcatgtccttcaagagatacgccatgattagcggcaacatctgccgctgtcgcatctgcagggtgttttaccagaccatgaacacctgccgatttgacttttacgcccggcagacgtttacgcagcaagcgctcgccaatgggcgaacggcaaatgttgccggtacaaaccaccaggattgagttaaattttagttgggccatgtttgaatccaccgtgaagtctctgtcaggtcatgcaccccggaaatcgtcggtaccagcagagaaatcacacggttccaacgagccagcggcgcggtagtgacataaacaatgtcgtaaggttcaagctggaattccgttccgagtatcattgccgatgcgtccttcgcattcagctgataaatattggcgattttgccattctgcttgttttgcgttgcacgaataacaaaaatccccgtcgcatcagcgacatcctgattcataccctcagcgttacccagcgcttccgccagggtcataccgctgcggtccattttcagcgtgctctgtttacccacttcacccatcacgaagactttcagatcatcgttgcgcggaataaataaaatatcgcccgggtgcagcagtttgttctggcgcaagtcgccacgctgcatcagcgcatagaggttcactttggtctttacgccattctgggtgagcaccacgttgcgccagtctgcatctgcggtcagaccgcccgcggcgttaatcgcatccatgatggtcagaggaatattggtaatcggctgctgacccgatttgctgacttcgccggtgacgtacgctttttgcgatcggaacgccgcgacgctgacatcgacttgcgggctttcaatgactgaatcgagacgcgctgtaatctcgttgcgtacctgggtaagtgttttcccggccactttcaggcgaccaatataggggtagaaaatcgcaccatcggcgttaacccagttgccggtatcactggcgctacggtattgccctgcgggggtggttagttccgggtgatcccagaccgtaaccatcaacacatcaccaatcccgatacgatattcatagtttgcgatttgctgctccagctccgggttagcctgcgacataatcggtttggcgcgcaactgatcaatcaatcctggcgtgacgggatagatattgaccattttgtccaggtcatactgattgtcaggtagttcaatgacatccttgttactggtcgataaattctgaccaggaacaagggtacatgctgtcaaagacagaacagccaatgtcagtaccgaaaacttaaaaatgttctttttcattggtttatatttatcagtcaatgtaatgttatgaattacgtcaggttattgtccaaccggtacttctcgctctgccgtcattggatagagctggtatttgcgtgacagcatttgtccaccatcacgcgtcaatggtgtccacgaaaccaccgcgcggttgcggttaggtccaatggtcatcaagtcgaatggaatcgagatataaaaacctttactaaagccgccttcgccgtagtcatctttagatacgttactgattgccgcccatacccctaccgccacgccgctgtcaaagcgtttggcgacgtcgatcgttgcgcctttatcttttgccagatattgcccaacgctaagtttcatcagtacgccattgagcgtcggcgggttccagtaagccgtcacgaaacctgttggcgtggaataatcggtgaaacgcatcatgttgtcccagtcacgttgcttcacgtagttaacgtccacacccagcgcccagcaggcatctagcgggcgataaagcagctcggaaccgacaccggcgtacatcgtttccagataaccgccatacacctggccatagaaaccattgcctaagtcagcaaaatagttcgcctgcaagttgttgagataaacgtcattgcgaacgtagtcacggatatgcgtgcgcacgcggggcagggtagagtccgcgggcaacagcgaagacttaaacttgtcgtagttgttgtaaatattggtgaaaataccgccatcaagcagcaggtggtcggtaaaccagtagcgggcactggacatcagccccagctggaacatatagaaatcttccgggccgcccagcgactgtgaaagtgttgggttgaaagagtagctaaagcgatcttcacgaatacggtagccccgaccaaaggcagaaagatcttcagcttcaacacgttgttgttgcagtggctctgattgaccaggcgctgtacctgccagctgtttgcgcaggctggctacgtcggtttcggtagtcaccatcgccatatgctcgcgcttttgcgtcacgctaatcttctcaacgccttgcggcaggttattcaccagaatccggttggcacgatcgaccgcttcacgagagtcacggtatttgtattgctgaccagacatatacagtgtcttatcgcgtagctgaatttctggcgcgtcaaagcccgcgttatacttcagggcggtaagttggtttgctaccgtggtgtactgcaatccttcagattcaggcgcaggttgatatgccggttttggcgtatcgcgcagggcagggcgcagatcgttgaaattggtccgtaacgtgaagccaaacatcaacgtgttaccgcgttcataactcaggttgagatctgcccagctggcagcgcgataaactgcgccgacgttgaaatggcttgcctgaggcagtttgccagcgaaatcattctggtaattgtttccatcgtattcgagtttcagacgcaggggattccacggcgtttgatactcaatgccgccaaagatggaagccgggccacgaaagatatcgctaaagctgatatcgcccgcatcgtgagactctgcgcgatgacaatatttatcgctcacccggcaaaacgggttggtaatattgcccgcattaccggcgtagccccatgccatcccgagggtgaaatcaaatggccccgcttgcttgctggccaccagatactcaccgtcaaacagacccgtaccagcaatatcacgtttaccaaacgccacttgcggtagccagtaaccttcttcccacaggcgaagtttaaaatcgaatgatttgtctttgtatgactgatcgccgctgaaatcttcccactggctatatttgcgtgtgcgcacatccgtataacgaatggtgccttccagccatgggaacagcgccacggaggtggagtagaaccggtattgatcgttatcccggtagttgacgctgaattcaccttccggtgcgatgcgcgcatttggcatctgcaacaatcctgtgccgccaaagtctgattgcgacgaacccagcggatccgggtaggttaatacttcagcatgacaggcactggagacggcaatggccaggcagcttaaaagataagaattcttcttcatcagtcaggaacacgttgcgttaaaacagacacaatctggtcatttaaatcagcatatttttcgggcagtacatgcgcagaaaagcccaaccaaagctggctgccaggcggtggttccacatgtcttttattccacagggcaacaggggcgacgacagtctcaccctcaggcgtaatcaccataacgttattcttgtccgcgcctgcaaggcgggggtgatcttgcagataatcggtaacgctacggcctgcctgccagggcaattgcccggccccagaaaccgcacccagcagagtaatagtcaccggacgctgtacggtatagagcgtatagtccccgaccaacgggggattgctgttctcatccactcgtacaaaatcagggtccagtttgaccggtaagcgaccagtgatattgagattgagtaactgctggcgcacggatttaatcgttgccgccacatcgtcgtcagcttctgcttcccaggaagcaagctgtgccatgacatgttggtagtctttaagcgctttagctttcgccgcagagtcggtcagcaaggcaccaggccaccagaggcgatcgcgcagttgcggttgtgtcaccaactggacaacattttccacggggccaacggaaagtgtctgttgttcgccaggcagataaatagtcaccgttccttgcgcaaaggcatggggtgtcattacgtaaagtacgctggcaatgaaatacgactgtaatttattcatggtgcgggtttaagaaacgtcatttctacgggaataacccctgcgcctaacatttgccgactttgacgaacctggccagtagccgaatcgacccagaatgtgttttgccactgtttttctggccgcgtggaagtcacctcttcctgccagacattacacagcacattgcgacccgcaatattcagcgtctctaatccagcaaaggaaaaagtagaactcagggtcgcagagcgaaaatggttgtcttcactccagagaatatcgcgcgtccagcggctgccatcttttattgccagcgcgttacgcagagggtcctgcccggaatttgtcacttccagcagattattattaagtttgacggtttttaaaagacgtccattgtgggtaaccagcatggcgttatcctgggataaccatttgctttgttcttgttctatatatcccagtaccacaaagattcgttgcccttcattaaggcgtaaatacatagtggaataaggcaacgcctggatctgctgatccgctacggtgatatcctgattatcgaaaaggctggcgcgaaatgtatcgaccatactttgctggctgtgcgtacatcccgcaagaaatagtgcgaaaatcgataaaataagagggcgcacctttaatccttgaaaggttaattaaaaaaatgcaaatctctaaagcccggtacgaatatcgcaaccgggtatcatttaactttaatttcgacgcgttaaagcagtattagcgtgtagtggacgtggtggttgaggtgttatgagaaccgccatcgccactgtcatttgctgcaacaactgccaacgtcgccacaccaacagccgttgccacaccgacaactgtcgccgtgccgacagcgccagcagccacgccaccagtggtagtagcagtcgtggttgcgccggtagtggtcgttgtggtgccagtagtacccgtcgttgcctcggtcccgtttgttgcttcaggggcagcaaacgcagctggcgtcgtcaacatgaaggccataaggattgcagaaagcttgtgtttcataacttttcctttattcatcgcatggacaatacgggtgatgctgccaacttactgatttagtgtatgatggtgtttttgaggttctccagtggcttctgtttctatcagctgtccctcctgttcagctactgacggggtggtgcgtaacggcaaaagcactgccggacatcagcgctatctctgctctcactgccgtaaaacatggcaactgcagttcacttacaccgcttctcaacccggtacgcaccagaaaatcattgatatggccatgaatggcgttggatgccgggcaacagcccgcattatgggcgttggcctcaacacgattttccgccatttaaaaaactcaggccgcagtcggtaacctcgcgcatacagccgggcagtgacgtcatcgtctgcgcggaaatggacgaacagtggggatacgtcggggctaaatcgcgccagcgctggctgttttacgcgtatgacaggctccggaagacggttgttgcgcacgtattcggtgaacgcactatggcgacgctggggcgtcttatgagcctgctgtcaccctttgacgtggtgatatggatgacggatggctggccgctgtatgaatcccgcctgaagggaaagctgcacgtaatcagcaagcgatatacgcagcgaattgagcggtataacctgaatctgaggcagcacctggcacggctgggacggaagtcgctgtcgttctcaaaatcggtggagctgcatgacaaagtcatcgggcattatctgaacataaaacactatcaataagttggagtcattaccgacaatacgtacgcttgagatcaggattgtctactttgagtataacatccttgtgaaatctccctttcctcataccgcttgcactatatactgcgggtaggaaaggcgcgcagagggaaatataagattgttaactatccccctctggaaatacgacttgtgagcataagataaatcttagcaaaatacaaattaaagataaggaaattgttacgaaagctattaattattgttggtaatatagtttcaagtggtactataactggctgttaaatggcatttataactattaggtgcagagatattcgcttaaatggattagtttctttgtggaaaagtaactgatgttataatgtatgatgttgactatttcactattccaataaaaccagtcagctttaaacaagcagcgtcatattaagagagataaacatttgccgctgttggtcctcgcaggccatttacgcggcaaaattccacacgtaatcctggtataagcacttctgcgtcgcggggagtgaatgcggaaatatggacctgaacttctttacgaccgtcggaggggataatgaatcctttgccgcttttgcgatcaaaggttttgacaattcctgtcattttacgggacaaacaaattccttactgaaaatactgcgctgcactatacggggttaataaaataaagccagcgatatttaagaccgccggacggctaaaataaaatttgcttaatctcaattatcatgcgttaatagctgcgtcggtttgaaagacagacagcatacaaagtagtttactaaagcagttctcattatcaggcattatccccttcttttgagtctctctcctgaacactaagtagtttctgtattaaagccctgtttgccgaaaggcccaaaatgaaggaagtaaaatatgtctaataaaatgactggtttagtaaaatggtttaacgcagataaaggttttggctttatcactcctgatgatggcagcaaagacgttttcgtccatttcaccgccatccagagcaatgaattccgcacgctgaacgaaaatcagaaagttgaattttctattgagcaggggcaacgtggccccgcggcagcgaacgttgttacgctctaaggttgccattattactcaacatctccatttccgctgtccatgttgtcatggttcacagtaccgcacatcggcattcgatgtgacggagcgaaaccctttgggcgctaagtgtattttttgtaaatcgacgatgatcacctttgataacgtcgcgctgcaaatacgcactgaccatgcgccgctggatttcacaaaataatatcaggctccctcgtggagccttttttatatctgccttatttttcttcaacgctgtatgtatagtaagcgataacctgttgattattgaatctttcggggagatggcttataacatttcttacctgaccagggtaccgggaaccaacaccttactggcgtgttgctgtcttttaagaccagaagaggttaacagtgaatattgaagagttaaaaaaacaagccgaaacggaaatcgccgactttatcgcgcaaaaaatcgccgagctgaacaagaatacagggaaagaagtctctgaaattcgcttcaccgcacgagaaaaaatgaccgggcttgaaagttatgatgtcaaaatcaaaataatgtgattttgtgaacatcaccccgtgcgaggtgatgttccgcttgttgctaatttagtgaccaatcattggcgcttgtggaattaagcgtcggtacaattcctccggcaccgggctttgccatactcccgcatacattgcgtaaccaatcaccgcaaacataatccccagaaccagtagcgtcattaaccagccagacaacgcaaaggcttttttatttgccgcaggtttttgcagtgaaaaggtcaatgttgaggctaccggacatgactctacgcaagtcatacagccggtacattccactgttcgtacctgaattaatttatcgaccgggatccgtgatgggcaattttttgcgcatttgccacagtcgatacaactttcggcattgcgacgaatcttaaacggcgacaatagcgaaaccacgcccatcagcgcgccatatgggcaaagataacgacaccaggcatggcgaataaacaggctggcaatcagcaaaacggtcacgctgattaatgtcgcggtccccatatgacgaaagaaatcgagcattttaacgtccatcaccacgctgtagggcgacaacataaaatagtgaatcgcctgagcgggcatcaataacgcgatatagataaaaaaactcaacagcaaatacttcacgccgcgcagaggaatatccagccagcggggaaggacacattgccgaccaaacagtttgttaccgagatcgccgattaattcagaaagcgtaccaaccgggcataaccatgagcaaaaggcctttttgagtaatagactgatgacgataaaagcgaccaataacagcatcgcggcggcgtggacggacggtaactgacctgttacaaggctatatttcagattcatcagcccggcaatcggtagccagccttcgatacctcccggtctggcgacaaatgtcgtgctacttgccgtttcgtaatagcgcacccaataccagaacgtgatggcaatataaatattcattgccaacagtaataattgcgtcgctttacgccaggtcgtggcattacgccagtcattccacggtaatttgccgcccgtcgtgcctggccgccgctgccagcgggttcttttattctctgccatgattttgccagtccgttaagttgtataccaaatgccactattctagttgttcttaactggctgatattgattcaaatcgcgttcaggtctttcttatgcaaccatgcttccagagcggcaacactgcgtgtaatttcttcgtgtggaaggggggcagataatggctgctgctccagttgtgcgcatagctggctggcgatatgcattcccagactcgagcaactgctttttagctgatgcgcggcacgctttattttctcgctatcctgactggcgcgggcaatgtcgatttcatcgagaagcggcagggcatgttgtgtaaataataccagccattcgtggatcttctccgtccccattaactgagcatcttcattgagttgcgatacatccagcgattgatcattattgacttgcagttggagatagtgcgccagtaactgaccgagcacttcacgcggcaccggtttagggataatcccgcggaataatgaactggtacgctggcgcagcgtttcgtcaatgacatgggcgctaaagccaatcaaaaccagcgacggatattgctgtgccagttgtcgggcaagcgtaatgccgtcgatatccggcagatcaaaatccaccagtgcggcagcaaacggttcgctattttgcagtgtctctaaagcctgcgcggcattgccaacagcaacaatctgcgcaccactggttttcagcatctcaatggtaattcgctgggttagcgggttatcttcaattaacagcaaacgtaaaccgtcaagacgcaccgcctgattgactgtttttggcacgggtgccgtggcaacacgtaacggcaagcgtaaacaaaaacagcttccaacctccggcgtgctggtggcgctcagttcgccgcccatcgcctgggccagacggctactgatagtcagtcccagcccggtgccgccgcgtttgccgcttacctgcacaaatggctggaagatttctgccagtttcgcgggatcaataccgcagccgctgtcttccacttcgaccagccattgctcgccatcagtgcgactacgcaggataatgtacccttcgtcagtaaaacgcagggcgttgctcaacaggttggttataacctgacgaatacgtcgtggatcgcccattaacgcgcacggcatatcatcggcaattgccgttgccaggcgaatcgggcgacctttcacccgtccgctcattaattgcagggtactttccagcagcgggcgcggttcaaagggctcatcgctgaccgaaacattcttgccacctgcttcgatagcggaataatcgagaatatcgttgaggatggtcagcaacgattcaccagagtcagtaattgcccgcaaatcatcacgctgggcgttaagtgcggggttatctgccagcagttgagcagtgccgagaataccgtacagcggtgtgcggatctcatggctcatcgccgccagaaacgccgattttgcctggctggctttttctgcttccgcccgtgcctgtcggtgttctatcaccagttcctgcaattcagctgtacgcgctttgacctgcgccgccagctgttcgcggtggcgattcagtgcatgaacattgctgcgaaacgcatccatcagccgcccgatggtatccagctcccgtacgccagcggtttccgggaaaggggagtcaatatcaccgtccagcagccgttgcagcgcctgcgtttgttcggcaagtggacgcgtgactgagcgataaaccacgcgccagaggatcagaatcagtgcgcaaagtgaaaccatccccagcaataacaggctgtattgcccgcgtgcactcgctttttccagatgcgccagtccgtgctgattacgcagctcaatggtgtcgaccagctgactgacttcgctactaaactgcgcgaactgggcgatgttattttgtgcgagagtttgtaggtgattgctgatttcactgtcctgctgatacagcgccagcaaatcgctatattggctaacggtagttaacgttgttgcgacctgcgcacgaacacccggatcttcaatgcgtatttgccgacgttgcagaattttcaccgcattattgagctgcttttccagcgttggtgcatttttctggatctgctccagccccagattcatcaccatttgctgcacccgcagagcgctaaggcgcagttcattcatctggttaacatactcaagatcgatatcaatcagccgatcgagtgcactttcagcagcctgacgctgatcttgttcgatcaaatcgtaaatcccggcctgggtcgctccagcggaagttgtcgcattattcgcctgaccttgcgccaggcgtgcgatctcatcggcggcagcgactatctgctgactgagttgctgttgttgctggcgcagttgcaaacgctgccccaccagttccccttgctgacgtaacgaacgggagatctcctgctcctgttgttcaatagcggtggtatcaaaaccttgttcccgtaacgcttgcagcaacgcattaatcttcaggctttgtgcggtgagcattcgcccctgcgcctgccacatcttttcgttatcggcactggtcaggttctgcgcggcgaaaagttcccaggcgctggcttcgctcaactggcgcgccatattcatggtaggaatcaatgcctgagtgttgtctttttccacctggctgataaagcgcaggttgtaccatcccaccagggtactggtcagggttaacagcgccatcagggcaaagcccatccagagtcttcgggtcagggttaaattcacggtcggtgcactttaggtgaaaaaggttgagtcgcaaagcggaatgcatctagcataaagccttattattgatgaggctatcatgcgcgtactgctatttttacttctttcccttttcatgttgccggcattttcggctgataacctgttgcgctggcatgatgcgcagcatttcacggtgcaagcctctacgccgcttaaagccaaacgcgcatggaaactgtgcgcgctttatcccagcctgaaagattcatattggttatcgttgaactatggtatgcaggaggctgctcgccgctacggtgtggatttaaaagtgctggaggcaggcggctacagccagttggctacccagcaagcacaaatcgaccagtgtaaacagtggggcgcagaggccattttgctcggtagtagcacgacctcatttcccgacctgcaaaagcaggtagcaagtctgccggtgatcgaactggtaaatgctattgatgctccccaggtgaaaagccgcgttggtgtgccctggtttcagatgggctatcaaccggggcgatatctggtgcaatgggcgcacggtaaaccactgaatgtgctgttgatgcccggacccgataacgccgggggcagtaaggagatggtcgagggttttcgcgcagccattgccggaagcccggtgcgtattgttgatattgcgcttggtgataacgatattgaaatccagcgtaacctgttgcaggagatgctggaacgccatccagaaatcgacgtcgttgccggaacggccattgcggcagaggcggcaatgggggaagggcgtaacctgaaaacgccgcttaccgtggtgtcgttttatctttcacatcaggtgtatcgcgggctgaagcggggaagagtgattatggctgccagcgatcaaatggtctggcagggggaactggcggttgagcaggccatcaggcaattacaggggcaatcggtttctgataatgtcagcccaccgattttagttctgacgccgaaaaatgccgaccgtgaacatattcgccgctcgctgtcaccagggggatttcgtccggtctatttttatcagcacacatcagcggctaagaaataaccttcaccatgttgcgtcaccagtaaatccgcgctgagtttatgacgtaaacgacgaattaacacatcgacggtgcgcaggtcagggttttccacccgacgcgcagaaagcatacgtagcagacgttcacggctgagaatttcgcccggattcgtcacaaatgccaccaacatttcatactctgcgcgggtcagtttaatcggctcgccatcccgctccagcgtatggcgcgacacattcaggcaataaccggcaaagcgatagcagttgtcctgagtgtgcggttgagcttgtcgcgcgaggtcgattcgccagagcagatttttcacccgtactaccagttcgcgcagttccagcggtttggtgacgtaatcgtctgcgcccatttccagcccaacaatacggtcaatccgatcgctgcgtccggtaaccagaataatccccaccgttgagcgttctcgcagggcgcgggttaacatcaggccattttcatcgggtaagttgatatccagcagaattaaatctaccgactgattctgcataatttcccgtagcccagcaccgctcgccgtaacggaaacggtatacccctcctgagtgaagtaggattgtaatcgcgcctgggtaaccggctcatcttcaacaataacaatgtgatgtggcatcagagggttttactcattctgttcatatctgttcatattctgccgtaagccgttcatcctgaccagtgccgctgttcatatttgctcattaagatcgcttcactaaaccataattctacaggggttattatgcggaaactctggaacgcgctacgccgacccagtgctcgttggtcggtactggcgctggtcgcaattgggattgtgattggcattgcgctgattgtattgccacacgttgggatcaaagtcaccagcacaaccgaattttgtgtcagttgccacagtatgcaaccggtgtatgaagaatataaacagtcggtgcatttccagaacgcctccggcgtgcgagctgaatgccatgactgtcatatcccgccggatattccaggcatggtgaagcgcaaactggaagcgagcaatgatatctaccagacctttattgctcactccattgatacacctgaaaaattcgaagccaaacgcgcggaacttgccgagcgtgaatgggcgcgaatgaaagaaaacaactcggcaacctgccgctcctgccataactacgatgcgatggatcatgcgaagcagcatcctgaagcagcacgtcagatgaaggtggcagcgaaagataatcaatcctgcatcgactgtcataaaggtattgcccaccagttaccggatatgagtagcggcttccgtaagcagttcgatgagctgcgcgccagtgctaatgacagtggtgacacgctgtactctattgatattaagccaatttatgcggcgaaaggcgataaagaagcctctggttctctgctgcctgcttcggaagtgaaagtccttaaacgtgacggcgactggctgcaaattgaaattaccggctggacggaaagcgccggacgtcagcgtgtactcacccaattcccaggtaaacgcatctttgttgcctcgattcgtggtgatgtgcagcagcaggtaaaaacgctggagaaaaccaccgttgccgacaccaataccgagtggagcaagttgcaggccactgcgtggatgaagaaaggcgacatggtgaacgatatcaaaccgatctgggcttatgcggattcgttgtacaacggcacctgtaaccagtgccacggcgcaccggaaatcgcccactttgacgctaacggttggatcggcacgctcaacggcatgattggctttaccagtctcgataaacgtgaagaacgcaccttgttgaaatatctgcaaatgaatgcgtctgacaccgcaggtaaggctcacggcgataagaaggaagaaaaataatgaacaataacgatctctttcaggcatcacgtcggcgttttctggcacaactcggcggcttaaccgtcgccgggatgctggggccgtcattgttaacgccgcgacgtgcgactgcggcgcaagcggcgactgacgctgtcatctcgaaagagggcattcttaccgggtcgcactggggggctatccgcgcgacggtgaaggatggtcgctttgtggcggcaaaaccgttcgaactggataaatatccgtcgaaaatgattgccggattgccggatcacgtacacaacgcggcgcgtattcgttatccgatggtacgcgtggactggctgcgtaagcgccatctcagcgatacctcccagcgcggtgataaccgttttgtgcgcgtgagctgggatgaagccctcgacatgttctatgaagaactggaacgcgtgcagaaaactcacgggccgagtgccttgctgaccgccagtggttggcaatcgacggggatgttccataacgcttcggggatgctggcgaaagctattgccttgcatggtaatagcgttggtacgggcggagattactctaccggtgctgcgcaggtgatcctgccgcgcgtagtcggttcgatggaagtgtatgaacagcaaacctcctggccgctggtattgcagaacagcaaaaccattgtgctgtggggctccgatttgctgaaaaaccagcaagcgaactggtggtgcccggatcacgatgtttatgaatattacgcgcagctaaaagcgaaagtcgccgccggtgaaattgaggtcatcagcatcgatccggttgtcacatccacccatgagtatctggggcgcgagcatgtgaagcacattgcggttaacccgcaaactgacgtgccgctgcaactggcgctggcacatacgctgtacagtgaaaacctgtacgacaaaaacttccttgctaactactgtgtgggttttgagcagttcctgccgtatctgctgggtgagaaagacggtcagccgaaagatgccgcatgggctgaaaaactgaccggcattgatgccgaaaccattcgtgggctggcgcggcagatggcggcgaacagaacgcaaattattgctggctggtgcgtgcagcgtatgcagcacggtgaacagtgggcgtggatgattgtggttctggcggcgatgctggggcaaattggcctgccaggtggtggttttggttttggctggcactacaacggcgcaggcacgccggggcgtaaaggcgttattctgagtggtttctccggctctacgtcgattccgcctgttcacgacaacagtgactacaaaggctacagcagcactattccgattgcccgttttatcgatgcgatcctcgaaccggggaaagtgatcaactggaacggtaaatcggtaaaactgccgccgctgaaaatgtgtatttttgccggaactaacccattccatcgccatcagcagatcaaccgcattattgaaggcttgcgcaagctggaaacggttatcgccatagataaccagtggacctcaacctgccgctttgccgatatcgtactgcctgcgaccacgcagtttgagcgtaacgatctcgaccagtacggcaatcactccaaccgtggcattatcgccatgaaacaggtggtgccgccgcagttcgaggcgcgcaacgacttcgatattttccgcgagctgtgccgtcgctttaatcgcgaagaagcctttaccgaagggctggacgaaatgggctggctgaaacgcatctggcaggaaggtgtacagcaaggcaaaggacgcggcgttcatctgccagcgtttgatgacttctggaataacaaagagtacgtcgagtttgaccatccgcagatgtttgttcgccaccaggcattccgcgaagatccggatctcgaaccgctgggcacgccgagtggcctgattgagatctactcgaaaactatcgccgatatgaactacgacgattgtcaggggcatccgatgtggtttgagaaaatcgaacgctcccacggtgggcctggctcgcaaaagtatccgttgcatctgcaatctgtgcatccggatttccgacttcactcgcagttatgtgagtcggaaacgctgcgtcagcaatatacggtagcgggtaaagagccagtattcattaacccgcaggatgccagcgcgcgcggtattcgtaacggtgatgtggtacgcgtctttaacgctcgcggtcaggtgttggcaggggcagtggtttctgaccgctatgcacccggcgtggcacgaattcacgaaggggcatggtacgatccagataaaggcggcgagcctggtgcgctgtgcaaatacggtaaccccaacgtgttgaccatcgacatcggtacatcgcagctggcgcaggcgaccagtgcgcacactacgctggtggaaattgagaagtacaacggaacagtggagcaggtgacggcgtttaacggccccgtggagatggtggcgcagtgcgaatatgttcccgcgtcgcaggtgaaatcatgaccacgctgacagcacaacagattgcctgtgtttacgcctggctagcgcagttgttctcccgtgagctggacgatgaacaactgacgcaaatcgccagtgcgcagatggctgaatggttttcgttgctgaaaagcgaaccgccgctcactgcggcggtgaacgagctggaaaaccgtattgccacgctgacagtacgtgacgatgcccgtctggaactggccgcggacttttgcggcctgtttctgatgaccgacaaacaagcggcgctgccgtatgcatcggcctacaaacaggacgagcaagagattaaacgcttgttagttgaggcagggatggaaaccagcggcaatttcaacgaaccggcagatcatctggcgatctatctcgaattgctcagccatctgcatttttcgctgggagaggggaccgttcctgcgcgaagaatcgacagtttgcggcaaaaaacactgacggcgctgtggcaatggttaccagagtttgttgcgcgttgtcgtcagtatgacagctttggtttttacgcggcactaagccagttattgctggtgttagtggagtgcgaccaccaaaacagataacgtcgtttgtgcgcctgaaaagacgcgtttagcgtcgcatcaggcattatggcgcagttgccggatgcggcgtgaacgtcttatccggcccacaggaactgtaatctttgtagaccggttaagatgcgtcatcgcatccggcaaacacacatcacggatgagctacaaaccgggaaagccgctggcgcagcaggcggttttcctgcttcaggtgcgcaatatcatccattaacgtcagcgccaccgcgatccccggccagtccagagccagttcatgacgcaggcgtaccgcgcgttgcaccacaatggcggcatggtcgtcaaatacccaggttgtttcctggatctcacgcggttcaaccacccccaaaccgacaatttcattcaactcctcttcagagatgccggtatgcaggcaaaattcggtaatagtaaaagtcaccgtaacattagccattatgctttcccccaatctttacgtggatcaaaagacgactgggcgtctgccagttgctgccacagcgcggcagtgttttcatccggtttcggcggcatcacgattttcagtaccgcatacagatcgccggtctgttttttgctcaccagacctttgcctttaacgcgcaatcgttgcccggcctggctgcctggcgggatagtcagcaaaatgctttctttcagtgttggaacggtgactttagcacccagcgccgcttcccacgggctaaccggcaccacaatttccagatcctggccgacaatatcaaacagcggatgtggcgcaatatgaatcaccagccacaaatcgccatttggaccgccgttttcgcccggcgtcccctggcctttcagacggatgcgttgaccattgccgacgcccgccgggatcttcacattcagcgttttcggaatttcctgttcgatcatgccaaaggcgttataaaccggcaggttatagctgatggtacgcttatgctcagtaagcgtttcttcgaggaataccgccacttcgatttcaatatcgtggccgcgtgtggcggggcgttgacggctctggcgggcatgctgaccgaaaattgacgagaagatatcgtcaaaatcttcggcgttaaaactctgaccgtcgccatggtggaactgacggttaaattgcggatcgttgcgatgttgccacatctgatcatactcagcgcgacgttgttcatcacttaacacttcccaggcttcagcgacctctttgaagcgggcttcggcatccggttctttgctgacatcaggatggtatttgcgggcaagtcgacgataggcggtcttgattgtcttgagatcgtccgtcggtttcacgcccatgatggcgtaataatcctttaattccatagcgttatctcgcgtaaatcaacacaaattgaaggaacccctgtaaggtaactcctataagtgtagggtaatcctcaaaatttcatatgccaacacagaatatgttattgaaatcatcgcggagaggaggtcgccatcaagatgggttgctgaacatattttaaacaggtgaaaaagggtgagcgatttttgatagttgaaccaggcactttaagtttaactagggcgtcattatttattaaattttatagacgctatatatgggtagtaatatacatggaattagttgcactgcaaataattatttgaaacaggcctggaacgatataaaaaatgagtacgaaaaaaatcaaacatattcaatcacgctttttgaaaacacactggtgtgttttatgcggttatacaatgaactcagacgtaaagtaaatgaagaggatactccatgtctggaatgtgaatcactagaaaaagaatttgaggaaatgcagaatgataatgatctatcattatttatgagaatattgcgtactaatgatacacaaatttattcaggggtttcaggaggtattacatatactatacaatatgttcgagatattgatattgttagagtgtccttgccgggcagagcttcagagtctatcacagattttaaaggttattattggtataactttatggagtatattgaaaacattaatgcgtgtgatgatgttttttctgagtattgttttgatgatgaaaatataagtgtccagccagagcggataaatacgccgggaatatctgatttggattctgacattgatttgtctggtatatcttttattcagcgtgaaactaaccaggcattaggattaaaatatgctcctgtagatggcgatggatattgtctgttaagagctatactggttttaaaacaacatgattattcatgggcgctggtcagttataagatgcaaaaggaagtttacaacgaattcattaaaatggttgataaaaaaacgatcgaggctcttgttgatacggcattctataatctcagggaagatgtaaagacgttatttggcgttgatctacaatctgacaaccaaattcaggggcagagtagtcttatgtcatggagctttctgttttttaaaaaacaattcattgatagttgcttgaataacgaaaaatgtatcctgcatttacccgagtttatatttaatgataacaagaacttgcttgctttagataccgacacgtcggataggattaaagcggtgaagaattttcttgttgttctttcagatagcatttgctcattatttattgttaatagtaatgtggcatcaatctccttggggaatgaatccttttcaacagatgaagatcttgagtatggttatttaatgaacactggcaatcattatgacgtttacctccctcctgaactttttgctcaggcttacaagttaaacaataaggaaatgaatgcgcaactcgactatttaaatcgttatgcaatttaatggcaaaggcatatgctaaaaaccattgttattagtctcacacttttttattggtaaatattgtctctgtattggtaacgccgcagatattctgtttagccacaggtgcaattatcagcggcgtacgcgaggcaggggctaatcaggcatagtttgcgtcaaaccttgcctgtttttgaagatgtatatagaaaaacaggcgttcaacaagccattttgcgaacctgttcccggaaaaaagtcatatttctgtcacactctttagtgattgataacaaaagaggtgccaggaatgaacaaaacgctaatcgccgcagctgtggcagggatagttttactcgcttcaaacgctcaggcacaaaccgtaccggaaggctatcagctacagcaagtgctcatgatgagccgccataacttacgtgcgccgctggcgaacaatggcagtgtgctggagcagtcgacgccgaataaatggccagaatgggacgtccccggtgggcaactcaccaccaaaggtggcgtgctcgaagtgtatatgggccattacatgcgtgaatggctggcagagcaggggatggtgaaatcgggggaatgcccgccgccgtacaccgtttatgcctatgccaatagtctgcaacgtaccgttgcgaccgcacagttctttattaccggcgcattcccggggtgtgatattcctgtgcatcaccaggaaaaaatgggcactatggacccaacctttaacccggtgatcaccgatgattccgccgcattcagtgaacaggcggtggcggcaatggagaaagagctcagcaaactccagcttaccgacagctaccagctactggaaaaaatcgttaactataaagattcccctgcctgtaaagagaaacaacagtgttcgctggtggatggcaaaaatacctttagcgccaagtatcaacaagaaccaggtgtttccgggccgctgaaagtcggcaactcgctggtagatgcgtttactttgcaatattacgaaggttttccgatggatcaggtggcctggggagaaatcaaatctgaccagcagtggaaggtgttgtcgaagcttaaaaacggctaccaggacagcctgtttacctcaccggaagtggcgcgcaatgttgcgaaaccgctggtcagttatatcgacaaagctctggtcaccgatcgcaccagcgcaccgaaaattacagtgttggttgggcacgactccaacattgcctctctgttaacggcgctggatttcaaaccgtatcagttgcatgaccagaacgaacgcacgccgattggcggcaaaatcgttttccagcgttggcatgacagcaaagccaatcgcgatttgatgaaaattgaatatgtgtatcagagtgcggaacagttacgtaatgccgatgcgttaaccctgcaggcacctgcgcagcgtgtgacgctggaattaagcggttgcccgatagacgctgatggtttctgcccgatggataagtttgatagcgtgttgaatgaagcggtgaaataacagaaaactcccccgcgagaagcgggggagtcgctggttaaacgtttttacgttcgatggtctgttcgccccaaaaaagcgaatctttatcggtcttagcaaaggctttgactaacacttcatcactaccttcttcccaaatcttttccgccattttttcgtcgtacccggcgacttcgaaaatggcctcggctatttccggcgacgtattgcgcagagatgcccattcaccgacgtgatgagctttcgcttcttgagttggcatgcgtatcctcctgttgaagattagccgttaagtttaactgccagacctgcgacatattccccttgataacgagcaatagacagttcttcctggctgggctggcgtgaaccgtcaccgcctgcgatggtggttgcgccgtacggcgtaccgccgcgaacctgtgaaacgtcaaataattcctgcgctgcgtagccaatagggacaattaccatgccgtgatgcgcaagggtcgtccaggtggatgtgatggtttgttcctgaccgccgccagtaccggtggaactaaagacgctcgccagttttccgtatagtgcgccggaagcccacaggccgcccgtctggtcgaggaaggtacgcatttgaccggacatgttgccaaagcgggtaggtgtaccaaaaataatggcgtcgtaatcggccagttcttgcggggttgcaaccggtgcagtttgcgttttaccgcctgctttttcaaataattgcggcggcatggtttccggtacacgcttaacgacaacttcagcgccatccactttgcttgcaccctcagcgactgcgcgtgccatcgtttcaatatgtccgtacatggaataataaagcaccagaactttagccatttctaaccactcctcgtgttatctctattccgtagcgattcgctaccacttatttaaagataagacgtccttttcagagtgcaaatttcacaaccacttatttgatttataacaactttcacaagcacgtaattttgtcgcaaaatgacacatttttatctcatcgcgtttttttaatcataagagcggcttatggataattattggagatgatatctattctcgctaagaagctgttgcaggatattaccaaacgcgggtctgcccgcgtcagttcactaagcttagtcccacgtagcgaaaatatggcagccgccatacgccgcgttaattctatgcaatatgatgtctatacccagacggaggtcagtaatggcaaaccatcgaggcggttccggcaattttgcagaagaccgcgaaagagcatcagaagcaggtaaaaaaggtggacagcacagcgggggtaatttcaagaatgacccgcagcgcgcatctgaagcaggtaaaaaaggtggtaagagcagtcacggcaaaagcgacaactagccgggctaatcaatgacgaatgcatttttgtctgtagctcgtcaaaaagccatcaccgccggttacccggtggttgatactgatgacaaatgtaagcttgcctgatgcgcgatgcttatcaggcctaccagaagattgcaatatattgaatttgcactgttttgtaggccggataaggcgtttacgccgcatccggcatgaacaatgcgtacgttgtcaacaatctgcaccgccggtaaccccggcggttttctgtttatggctcctgatgaacaacttctggcggtggaacgtcaaccaactttctgcttaacaacgcattgagtaaaatcgcgccaaaggttgctgtaccaatccctcccaacgtaaaaccgcccagcgtgagagcaaaatcacccgcgcccagcactaaggttactgcgaccataatcaaattaccgttctggcttaaatcgacacggttttgtacccatatccttgcgcctgcgacggcaatcagcccgaacacaacaattgatgcaccaccaataaccgcggccggaatggtatgaatcagcgcaccaaatttcggtgaaaagcccaacagcatggcgatgacggcagcagcaacaaacaccagcgtcgagtagactttggtcacggccatcacaccgatattttcagcataggtggtcacgccgctaccgccgacagagccggaaagcatcgttgccagaccatcgcctacgaatgcccgccccatatacgggtccatattgcgtccggtcatcccggcgactgccttgagatgacctaagttttccgccaccagaatcaccgccacgggcgcaatcagcatcattgcctgaccattaaaagcaggagtggaaaaatgtggcagaccgaaccaggcagcatggctgacgagagtaaaatcgacggcttttcccagccctaaaacgttggtcatcacgccatacagcagacaggcgacaattaatcctacgagaatcaataaccgctggatcatgccacgggtaaacaccgccaccagcccaatacacagcaccgtcattaccgccatccagctatcaaaggccgaagccgatacacttttcactgcgataggcgctaagttcaggccaatcgccatcaccaccgcacccgtcaccaccggcggcatcagtcgttcaatccagcgcgtaccgattttcatcaccaccaggccaatgacggtataaaccagcccacaggcgataatcccgcccagcgcaatgctgatattcgggttaatgccctgaccgttaaagcccgtcgcggcgatcaccacgccgacaaaagccgcgctggagccgagataactggggacgcgcccgccggtaataaagaaaaacagtaacgtgccgatccccgacattaaaatggaaagattgggatccagccccatcagaatcggcattaacaccgtcgcgccaaacatcgccaccgcgtgttgaacgcccattactgccgtctgagcaaacggcaatcgttcatccggcgcgaccacgccgctctctgtagaggtcgattttaactgccagtgaggaaaaccgaacattgccatcagctgtctccttaaggaggttaacaagcagggcgcatcagcgcgtgataactgcgatcgaaccacaccagcccgtagggtgtggtgtgacgatgaatcgcttcgatggcgcaaaacagaatgtcgtgggtgccgacgctcaccacctggctgatacggcagtcaaacgaaaccagagcctcttccagttgcgggcatccggtcacccccgtctgccagcgggcggcggcaaagcggtgttccatgggcgttttgccgccaaaaaggtttgaaagcggctcctgcccggcgctaagtgtatttacacacagcgttcgattttcattgaatgccggccagacggacgccccacgattcaggcacaccagtaatgtgggcggcgtatcggtcacactgcagacggcgctggcggtgaacccggcgcgcccggctggaccgtccgtggtgataatattgaccgccgcgcccatgcaggacatcgcatcgcgaaaagtttgttgatcgacaatgttcatagtttgctccttacaacagcccgcaggcttcttcaaaggacagacgtggcaggcgcgcataaagcttgctgctatcgccatagccgatattaatcagcagattgctcttcagcgtgctgcccgtaaaaaaggcgtcgtccacgtgttgacggtcaaagcccgacatcgggccggtatccagtcccagcgcccggcaggcgacgatcagataggccgcctgcatggaactgttgcgaaacgctgtttcttcggcaagttgtgggctggaggtaaaccaactgcgggcatcaccgtggggaaacagtagtggtaaccgttcataaaattcactgtcccaggcgacgatagcggtgacgggcgcggtcagggttttttgcagattgccgctggaaagtgccgggcgcagacgttcttttccttctgccgtgcgggtaaacacgatccgtgccggagaacagttagctgatgtcggcccccatttcatcagggcataaatctcccgtaacgtctcatcgctgacgggtgtctcccgccagccgttgtgagtgcgggcatcggtgaacagggtgctaagcgcacctgggctaacggcttcgttcatagcaattccttacagggcggcttcacggtgatgtaacaggctggcaagcccgttgagtaacagagcattaaacgtttcgggatcggtcacgttgcaggcgtgtccgccatagggcatcaccattttctggctatcgggcagggcggcatgaagttcactggaacatgctgttggcaccagcagatcatcactggcgcagatgatttgcaccgggcagcggatgcgatccgcatggtgactaaagtcagcgcgtttgagggcgttaagtcgacgcagtaaattatttttgccctgaaaatgcgccagtgccagcgcgtcttctgcctccaggcgaggtgcgcgggccgccatccagtcggcgggatagaggaacaacggctgcgcttccacccatgcctgcgcgccgccgctatacagtaatcgttcgcgaacctgaaaacagcggcgcgtatgggcgtttattcgtagccagccgttaacgctgatcagcacagttaccgacgcgggataatccagcgccagctgcattcccaccagcgcaccgagcgcatggccgaccactgcgtaatgctcaatccctgcggctaccagcgcctgatgcagttccgctgccatctgggcgatactgtaatcttctgccagcgtgtcgggattattgccggtgccgcgctggtcgtaacagactacctgatactcctgctccagcaccgccagttgcggtaaccagtaactgccgctacccccaagacccgaaatcaacaccactacgggcgcatcagcataagggggaggtgagagtgaaagtttcatcgcggcctcacttggcgatatgcgcaattgtggcgatttccaccagcgcgtcaggttttaccagtccgcactgaatgcagaatcgcgccggtttatcacccggaaaaaactcggcgtagatttcgttaatcgcggcgtaatttttccagtcggtaataaagatgctgttgaaggtcacatccgccatcgtgccacccgccgtctcgatcaccttgcggatagtttccagaacgtggcgggtttgcgcctttgggtcatcggcaaacagcacgttattatgttgatcaaaagccagcgtaccggagacatacaccacgccatcagccagcgtgccgggaacgaagggggccagcggtgcgctgctgccagcgggaataattacggattttggcatcgttaaactccttaagcgatatgagcaaaggacgtgggagaaagcgcgtcgcagaatgtttcgacgtcgctgacccagccaaaaaaggtttcgatattgaacaacgcggctttctgcgcaaatttcggccccgcctggtgagttgcgtcttcaagcaccacgccgaaatactccagaaaaaagccgtcgcgtagcgtcgattcgacgcagacgttggtagcgatgccggtgaaaaccagatggcgtattccgcggctgcgcaaaatgctgtccagcggcgtattgaagaaaccgctgtagcgcggcttcggcagcacaatatcgccaggctgcggcaccagttcatccaccagttgataatcccaggagcctttcgccagcaatttcccctgcagctgcggctgcttacgcatggttttcagggcgttcgatttatgaaaattcggtgagccgggtccgccagcctcgacatactgttcatcccagccattttgaaaccagatgatcagcatccctgccgctcgcgctgcggtcacggcggtttgaatgttggcaatgaccgggcgagtggttgagacatcaaacccggcgagatctaagtagccgcctggcgtggcataagcgttttgcatatccaccacgatcagcgcactttgctgcggatcgaaggtaatggcttccggtcgagcggttaaggtcgtcatcatgccacctcctgagtcagcgcaggtagatgggcgcggcattgcatcagtggttgaatgcgctcgccgaaggtttcgattcccgacagaaaatcgtcgaaggttaacagcacgccttcggcaccaggcacgcttgcgacttcatctaacatgcgcgcgacactggcgtaagaaccgactaacgtccccatattgatgtttaccgccgaagtgggatcggccatctgacgaacgttggtgtcagtaccggagcgggtatctttctgactttgttcggttagccagcttaacgcctcttcatccgcgcccgctttgtagtgttcccatttggcgcgagcggcatcgtcggtttcatcggcaatcaccataaacaacacataagagccaacgtcgcgtccggtttgctctgcggcctgtttcatccgcgcagcggtcggggcgaaagccgtgggtgtatttacgcctttgccgaaacagaagttgaaatcggcataccgggcggagaacgccatgccagcgtcgctttgcccggcgcagatcactttcatggggacactcggttgcggactcacgcgacaatcattcatggtgaaaaaatcgcctttaaaatcgcttttccccgtgccccacaggtcgcgcagcacctgaacatattcggtgagatagtcgtaacgacgggagaaatagtcatcgccaggccagatacccatctgctcatactcgggcttttgccagccagtcacgaggttgacgccaaaacgcccgccagagatggagtcgatggttgcggccatacgggcgacgattgccggaggtaacgttaaggtggcagcagtggcgtaaatctgaatgcgcgaggtcacggccgccagccccgccatcaaggtgaacgactcaaggttgtgatcccagaactcagttttgccgccaaagccacgcagtttgatcatcgacagggcgaaatcgaaatggtagtgctccgctttttgcacaatggctttattcagttcaaaggtcggcatgtactgcggcgcgtgggtcgaaatgagccagccgttgttgccaataggtacgaatacgccaattttcatcatcaacctctcttcgtctcgtaaagtgaaagtcagacggggcgctgcatcctgcatatccttttcagccgcgtattggcttgtttgcaaagcggatgccagtttttaaaaagttaatgttattaatctgttaacattacgttatctaaaatatctggtaaaaagtggactaaacggtcaaaacagttgcacataaaacatgcatctgtgcgcgatgagagtgcagaaggtcgaggccgggcgggggttttgctatcctgttgccaatctacaagaggggagagcgcatgacgcaaggcgcagtgaaaacaacgggtaaacgttcgcgcgcagtaagcgcgaagaaaaaagcgattcttagcgcagcactggacactttttcacaattcggttttcacggcacaaggctggagcagatcgcagagttggcgggtgtttcaaaaaccaatctgctgtattactttccgtcaaaagaggcgctgtatattgccgtgctgcggcagattctcgatatctggctggcaccgttaaaagcgtttcgtgaagatttcgccccgctggcggcgatcaaagagtacatccgtctgaagctggaagtctcacgcgattatccgcaggcttcgcgcctgttctgtatggagatgctggcaggcgcgccgctgttaatggatgaactgacgggcgatttgaaggcattaattgatgagaaatcggcgctgattgccggttgggtcaaaagcggcaaactcgcgccgattgatccgcagcatttgatttttatgatttgggcttccactcaacattacgccgatttcgcccctcaggtggaggcggtgacaggcgcgacgttgcgcgatgaggtatttttcaatcaaacggttgaaaacgtgcagcggattattattgaggggattcgaccacgttaaagatgccggaggaggttgtaacatcctccggctacctgtttaacctatagtcattaagctggcgttaccgccagcggcagcggtattcacactcagcgaacgctcgatatacagccgttccagaaggatattgctttcgccacgggcaaaaccctgcaccgaaacaattgtgccatcccgcgcggcaactgcttcacacaatgcgcgaagctgatccgaatcaccgtggaagatcaccgcatcaaacggttgagcggttatattttccgctttcgccagttgaatacgttcgctgactgccgatggcaatgccttcactaactgacgatgcagcgcgtcatccggccacagtacctggctgcccaccgccagcacggcggcgagctgagtcagcgcatcctgctcatcatcggcaatacacaacacgcgctcacgcggcagcagcgtccaggtgttgcgttcacccgtcggccccggcagcaatcgttgtgttcctgcctgcgccagctcgccatattgcgtacataacgcctgcaattctggacgatttgctgcccattcccgcagtgcatttagcggctgagtcaatgcggctttcaactgcgcatcgaccggatactttgcatcctgacgcgcgagcgtcactgccagcgcactttccgggcgattcgccagcagacggtagagatagagcggaccgcctgctttcggcccggtaccggacaacccttcgccgccgaacggctgcacaccaaccactgcgcccaccatattacggttaacatacaggttaccaacatgggccgagccagtgacctgggcgatggtttcatcaatgcgcgtatggacgccaagcgtcagaccataaccggaagcgttaatctgctcgatcagctctggtagctggttacggttgtaacgcaccacatgcagcaccggaccaaagacctctttttgcaattcggcaaagtcatccagttcgatcagcgtcggggcgacaaaggtgccgctttgccattcacgggcatcttcgctgttttcccgcaccgcctggaacaccggacggcctttgctacgcatggtctgaatatggcgctcaatattggctttcgcttcgctatcaatcactggaccgatatcggtggtcaggcgacccggattacccatccggcattcggccattgcgccgcgcagcattttcaacgtgtggtcggcaatctcatcttgcaggcacagcacgcgcagcgccgaacaacgctgacccgcactgtcgaacgccgaggccagtacatccacgacgacctgttcggtcagtgctgaagaatcgacaatcatcgcgttcatgccgccggtttcagcgatgagcggaatagggcgaccctgagcgtccaggcggctggcgatattgcgctgcagtaacgtagcgacttcggttgaaccggtaaacatcaccccgcgcacgcgatcatcacccgtcagttgcgcgcccacggtttcaccccgacctggcagcaattgcaccacgcctggcggtacacccgcttccagcaaaatggcgatcccttgcgcggcaatcagcggcgtttgttctgccggttttgccagcacgctgttacctgccgccagtgcggcggcgatctgcccggtgaaaatagccagcgggaagttccacggactgatacacaccacaggccctaatggacggtgggtttcgttagcgaaatcatcccgcacctgtccggcgtagtagtggagaaaatcgaccgcttcgcgcacttcggcaatggcgttactgaaggtttttccggcctcacgcaccagaataccaatcagttgctgcatctggctttccatcagcacggcagcgcggtgcaaaatcgctgcgcgttcagccggaggcgtggcaaaccagattggcgcgttattaaccgcactttccagcgcctgttctacttcacgcggcgtggcttcacgcacatagcccacaatatctttcggttccgcagggttaataacgggcgacatctcacctgccgctaccggttgttccagcattggcaaggcctgccatttttgcagtgcactattgagcagggcagaggagagcgaggccaggcggtgttcgttagcgagatccagccctgccgagttgtcgcgcccgtgaccgtaaagatcgcgcggcaggggaattttcggatgcggtaatccagtttgcccttcctgttgcgccagtttttctacagcagtgaccggatcggcgaccagttcatccagtggcaaagaggtgtcggcaatacggttaacaaacgaggtgttagcaccgttttccagcaggcgacgcaccagatacgccaacagcgtttcatgtgtgccaaccggagcataaatacgacacggacggttaagtttgccgtcggcaactttcccggtgacctgctcatacagtggctcgcccataccatgcaggcactggaactcgtactgacccgggtagtagttctgccccgccagttgataaatcgccgccagcgtatgggcgttgtgcgtcgcgaactgcgggtagattagattcggcaccgccagcagctttttcgcacaggcgagataagaaacgtcggtatacaccttgcgggtataaaccggataaccttcaaggccgtccatctgcgcacgcttaatttcactatcccagtacgcgcctttcaccaggcgaatcatcagacggcgacggctgcgggtggcgagatcaatcaggtaatcgatcaccaacgggcagcgtttttgataagcctgaataacaaaaccgatgccgttccagcctgccagttccggctcgaaacagagtttttccagcagatcgagggagatctccaggcgatcggactcttcggcgtcaatgttgataccaatatcgtactgacgcgccagcagggtgagtgatttcagacgcgggtaaagctcttccattacccggtcatactgggcgcggctataacgcggatgcagcgccgacagtttgattgaaatgcccggcccttcatagatgccacgaccgttagacgctttaccgatggcgtgaatcgcctgctgataggaaaccatatacgcctgtgcatctgcggcggtcagcgcggcttcgcccagcatatcgtaagagtaacggaaacctttctcttccagcttgcgggcattggctaacgcttccgcgatggtttcgccagtgacgaactgctcacccatcaggcgcatcgccatatccacacctttgcggatcagcggttcaccgcttttaccgataatgcggttcagcgagcgggagaggctggcttcgttatgggtggaaaccagtttgccagtaaacagcagcccccaggtggcggcattaacaaacagtgacgggctacgaccaatgtgtgactgccagttaccgttgctgattttgtcgcgaattaacgcgtcgcgggtggctttgtcgggaatacgcaacaacgcttccgccagacacatcagcgccacgccttcctgcgatgacagcgaaaactcctgcaataacccctggaccatacctgcgcgaccactggcatttttttgattacgcagtttatcggccagctgatacgccagtttgtgcgcctgttcagcaactggctgcggcaggcgggcttgttccagcagcatagaaaccgcttcggtttccgggcggcgataggccgcggtgatcgcggcgcgggaaaccgactggggcaatatttgctcggcaaagtcgaggaatggctggtgtggttcctctgccggagtcggtgcttcatcgctctcattggccgcgccagaaagcagcgcaggtagctccggcagagtatcgctgttttccagttgttcgagataagaaaaaatcgcctgcttaattaaccagtgtggtgtgcgatcgatacgtgtcgcggcagacttaatacgctcacgcgtcgcgtcgtccagcttaacccccatggtggtggttcccatgccattactcctgttgttcagaaaggtgcaacttaacgttatcgtgaaatatccatgatgttgcaactttgtgcaaccatgttaaatgtgacatgcgtagcaagcttaaaaatgaatgaaatgttaataaaagaaatcgatatgacagggattaaaaaaataactcagactttttctctgcggcagttaacatttttgaaaggtgcaaccgcaaaaaatgtgagagagtgcaacctgatgaaaaatagtgtcgctgagcactaaaatttaatgtaaatggtgtgttaaatcgattgtgaataaccagcgcttccggcaggatacggtcgccctggtaaaacataaactctgttaccccgttccggtggcagatataacggcaagtttcgacattgccgataataattttttggagactttagatggctattagcacaccgatgttggtgacattttgtgtctatatctttggcatgatattgattgggtttatcgcctggcgatcaacgaaaaactttgacgactatattctgggcggtcgtagtcttgggccattcgtgacggcattatcggcgggtgcgtcggatatgagcggctggctgttaatggggttgccgggcgctgtttttctttccgggatttccgaaagctggatcgccattggcctgacattaggcgcgtggattaactggaagctggtggccgggcggttgcgtgtgcataccgaatacaacaataacgccttaacactgccggattatttcaccgggcgctttgaagataaaagccgcattttgcgcattatctctgcgctggttattttgctgttcttcaccatttattgcgcttcgggcattgtggcaggcgcgcgtctgtttgaaagtacctttggcatgagctacgaaacggctctgtgggcgggcgctgcggcgacgatcctttacacctttattggcggtttcctcgcggtgagctggactgacactgtacaggccagcctgatgatttttgccctgatcctgacgccggttatcgtcattatcagtgtcggtggctttggtgactcgctggaagtgatcaaacaaaagagcatcgaaaacgttgatatgctcaaaggtctgaactttgttgccattatctcactgatgggttgggggctgggttacttcgggcagccgcacattctggcgcgttttatggcggcggattctcaccacagcattgtccatgcgcgtcgtattagtatgacctggatgatcctctgcctggcaggggcggtggctgtcggcttctttgggattgcttactttaacgatcatccggcgttggctggtgcggtaaatcagaacgccgagcgtgtgtttatcgaactggcgcaaattctgtttaacccgtggattgccgggattctgctgtcggcaattctggcggcggtaatgtcaaccttaagttgccagctgctggtgtgctccagtgcgattaccgaagatttgtacaaagcgtttctgcgtaaacatgccagccagaaagagctggtgtgggtagggcgtgtgatggtgctggtggtggcgctggtggcgattgcgctggcggcaaacccggaaaaccgcgtgctgggcttagtgagctacgcgtgggcaggctttggcgcggcgtttggtccagtggtgctgttctcggtgatgtggtcacgcatgacgcgtaacggtgcgctggcggggatgatcatcggtgcgctgacggttatcgtctggaaacagttcggctggctgggactgtacgaaattattccgggctttatcttcggcagtattgggattgtagtgtttagtttgctgggtaaagcgccgtcagcggcgatgcaaaaacgctttgccgaggccgatgcgcactatcattcggctccgccgtcacggttgcaggaaagctaagggacttagcctgcggcggttttgtttggcttcagcagcgggttgcgctcccttaatgtgcctcgccatataaattgaatggtgcagggagcgcgcagggggcggccaatcgccgccgccccctgctgtcccggccttcggggaacgcttcagcgattttgacgccaccaacacccgagctgttattatgttccgggcaaaaagttagatttgataatcgcggatggacgaaattgcttgatacacccgcttatcagttttacatggaagctctgatgcattgagtctggacagttttgtcggctggatacggcgtttacgcggcatccggcaagaacacatggttctttgcaaacaatcccatctttctaccctggaataatcgtttatatcccttggcattacctctctttgtttacattccaacatcattttataaacattccgcttgtgtttttctttgccgtaatgataatcgctatcactgcgatttacttttctttgcatagattgactcagaaaaacgtttaagggtgggtggcatgtttgttccgtttctcattatgttgcgcgaaggacttgaagccgcgctgattgtcagtttgattgccagctatcttaagcgtacccagcgaggccgatggattgtgtgatgtggattggcgtgttgcttgccgctgcgttgtgcctgggcttgggtatcttcattaacgaaaccaccggcgaatttccgcaaaaagaacaggaactgtttgaaggtatcgtggcggtgatcgccgtggtgatccttacctggatggttttctggatgcgcaaagtgtcgcgcaacgtcaaagtgcaactggaacaggcagtcgatagcgcattgcagcgtggaaatcatcatggctgggcgctggtgatgatggtcttttttgccgttgcaagggaagggctggagtcggtctttttcctgctggcggcatttcaacaagatgtcgggatctggccgccgctgggtgcaatgctcggtcttgctactgccgtggtgctaggcttcctgctctactggggcggtattcgcctcaatcttggtgcattttttaaatggaccagcctgtttattctcttcgtcgccgcagggctggcagctggtgccattcgcgcatttcatgaagccggattgtggaaccactttcaggaaatcgccttcgatatgagtgcggtgctctcaactcactcgctgtttggcacgctgatggaagggatttttggctatcaggaagcgccgagcgtcagcgaagtcgccgtctggtttatttatctcatcccggcgctggtggcatttgctctgccaccacgcgcaggggcgacagcgtctcgctccgcgtaacaaatacgacgcaaactcttgcttagttacaacatactttaaagggatagtctcgtcatgaccattaacttccgccgtaacgcattgcagttgagcgtggctgcgctgttttcttctgcttttatggctaacgccgctgatgtgccgcaggtcaaagtgaccgtgacggataagcagtgcgaaccgatgaccattacggttaacgccgggaaaacacagttcattattcagaaccacagccagaaggcgctggagtgggagatcctcaaaggcgtgatggtggtggaagagcgggaaaatatcgcccctggctttagccagaaaatgacggcgaatttacagcctggcgaatacgatatgacctgcggtctgctgactaacccgaaagggaagttgatcgtcaaaggtgaggcaacggcggatgcggcgcaaagtgatgcgctgttaagtcttggtggtgcaattactgcatataaagcgtatgtcatggcggaaaccacgcagctggtgaccgacaccaaagcctttaccgacgcgattaaagcaggcgatatcgaaaaagcgaaagcactgtatgcaccgacgcgccagcactatgagcgtattgaaccgattgctgaactgttctccgatctggatggcagcattgacgcccgtgaagatgattacgagcaaaaagccgccgacccaaaattcactggtttccaccgtctggaaaaagcattgtttggcgacaacaccaccaaagggatggatcagtacgctgagcagctttataccgatgtggtcgatttgcaaaaacgcatcagtgaactggctttcccaccttcaaaagtggtcggcggcgcagccggactgattgaggaagtggcagccagcaaaattagcggtgaagaagatcgctacagccacaccgatctgtgggatttccaggctaacgttgaaggctcgcagaaaattgtcgatttgctgcgtccacaactgcaaaaagccaacccggaactgctggcaaaagtcgatgccaactttaaaaaggtcgataccattctggcgaaataccgtactaaagacggttttgaaacctacgacaaattgaccgatgccgaccggaatgcactgaaaggaccgattactgcgctggcggaagatctggcgcaacttcgcggtgtgctgggactggattaagcgttatgcagtataaagatgaaaacggcgtgaatgaaccgtcacgccgacgtttactgaaagtgataggtgcactggcgctggcgggaagttgtccggtcgctcatgcacaaaaaacgcaaagtgcgccgggtacgctttcaccggatgctcgcaatgagaaacagccgttttatggtgagcatcaggcagggatcctgacgccacaacaggccgcaatgatgctggtggcgtttgatgtgcttgccagcgataaagccgatcttgagcggttgtttcgcttgttgactcagcgttttgcttttctgactcagggcggagcagcaccagaaacgccaaatccgcgcctgccaccactcgattccggcattcttggcggctacattgcgcccgataatctcaccatcacgttatcggtgggtcactcattgtttgatgagcgctttggccttgcgccacagatgccaaaaaagctgcagaagatgacgcgtttccccaacgactcgctggatgcggcgttatgtcatggtgatgtgttgctacagatttgcgccaacacccaggacacggttatccatgcgctgcgcgatatcatcaaacacacgccggatttgctcagtgtgcgctggaagcgggaagggtttatttccgatcacgcggcgcgtagtaaaggcaaagagacgccgattaatttgctgggtttcaaagacggcactgccaatcccgatagccagaatgataagttgatgcaaaaagtggtgtgggtaacggcagatcagcaggagcctgcgtggacaatcggtggcagctatcaggcagtacgcttgattcagtttcgagtggaattttgggacagaacgccgctgaaagaacagcagacgatttttggccgtgataagcaaaccggtgcgccgctgggaatgcagcatgagcatgatgtgcctgattacgccagcgacccggaagggaaggtgatcgcgctggacagccatatccggctggcgaatccccgcacggcggagagtgagtccagcctgatgctgcgtcgtggctacagttattcactgggcgtcaccaactccgggcaactggatatggggttgctgtttgtctgctaccaacacgatctggaaaaaggcttcctgacagtacaaaaaaggctcaatggcgaagcgctggaggaatacgttaaacctatcggcggcggttatttttttgcgctgccgggggtgaaggacgcgaacgattatttcggaagcgcgttattgcgggtttaatgtttttaggcggataaggcatttgtgcgcagatgcctgatgcgacgcttgcgcgtcttatcatgcctacaatcagtgcgggtttggtaggctggataaggcgttcacgccgcatccggcgatcgtgcactgatgcctgatgcaaatcctgctgaaagcacacagcttttttcatcactgtcatcactctgtcatctttccagtagaaactaatgtcactgaaatggtgttttatagttaaatataagtaaatatattgttgcaataaatgcgagatctgttgtacttattaagtagcagcggaagttcccggcagtgatagtcagtcactatggagatcgcggatggtaacgtcctgtactggacatgttttagataatcaacgcgccaccactcgcggagttttctcctccggtagtcatctcgtcactttgcattttcaacctcatcctttcttttcatgtgttaccgacgccgtaaacggtgcgcgtagccgtttttcggcattttatccaaaagcaaactatggcttacaaggaagccaaccctctgatgttcgtgcgcataatcgcgctgccaacggcgcgtgtgatgaatacaaacaactcaaggtgctctccatgggaagacaaaaagcagtgatcaaagctcgtcgcgaggcaaaacgtgtgctgagacgggattcgcgcagccataagcagcgtgaagaagaatcggtcacctcgcttgtgcagatgggcggcgtagaagccattggtatggcccgcgacagtcgcgatacttcgcccatcctcgcgcgaaatgaagcgcaattgcactatctgaaggctattgagagtaagcagctgatattcgccacgggcgaagccgggtgcggaaaaacctggatcagcgcagcaaaagcggcagaggccctgatacataaggatgtcgacaggattatcgtcacccgtccagttctgcaagccgatgaagatcttggcttcttacctggagatatcgcagaaaagtttgctccctattttcgcccggtctacgacgtgctggtccggcgcttaggggcttcctttatgcagtactgcctgcgaccggaaatagggaaggtggaaattgcgccgttcgcctatatgcgtggacgtacctttgaaaatgcagtcgtcattcttgacgaggcgcagaatgtgactgccgcgcaaatgaaaatgtttttaacccgcctcggggagaacgtgacggttatcgtcaacggtgatatcacgcaatgcgatttgcctcgcggcgtgtgctccggattaagtgacgcgctggaacgtttcgaagaagatgaaatggttgggatcgtccggttcggtaaagaggactgcgtacgttcggcactttgccaacgtacgctgcatgcctacagttaagtgtgttatcggtgcagagcccgggcgaaccgggctttgttttgggtgtttatgcccggactagcgctttttctgaaacaaccatttttatttgcccctggctggtgaagtgtacgctcatcctgtggcttttttgtagttgctgatagagctcatcaggtattgctaagctctctgcatattcttgcggcgtatattggtaggctgcatgatgctgctgtttttgaaaacgcagcttattgtacagcgcccagacaattaacacgacggcattcgccactgccagcaaaaaatagaactgaagtcggcttctggcctcgctttgccagtaataacccgtcagcagatccatggcgaataagaatatgaacaacgcaaataatgtccacaagatggttgtggcaacataatcaaccagtaaacgtactggtgattgtcgggtcgtaataattaaattgttcatattaacctctcagaatcccgcgatcgggacttacccaacgggcgcgttgctttttaggcatcaacatgactcgtgtaaatgataccaatgtcgttgccaggctcagcatccagaaaataaccgggaaccaaataatccagaaaagcgatgaagtcagattatgctcatagcgattctcgatcatcaggctgacaataaattgcagtaaacataacgtacacaataatattccggcagtatgtgtcgcagcgatatgtgtcaattcaatatttaacggtacaccggcaagttggactgcgtaaataatgaaaccgaccaggcaggtgaaggcccatattgtcgtcaggcagtattcaaaaaacagcggccacattcgaaagttttctttgcgccacaaccttgtcatatttttgaggaatacttctgcaccgccctgagcccagcgcaggcgctgtttccacagcccttttaacgtttcaggcattaatatccagcacagtgcccgtggctcgtaaaaaatcgtccactgattcaactgcagcttccagctaatatcaatatcttcggtgatcatatcgtcactccagtaacccacttctgccagggcgctgcgacgaaatgcggcaataacaccggaaacggtaaatacgtttccatagatacgctgggttcgcttgatcaaaccaataattgaggaatactcgccaacctgaattttacccaccagggtagaacgtgttcgaatacgaggattaccggttacggcacccacacgcgggttgtacaacatcggttccacaatatatgccgccgcatcgcggtctaataacgcatcgccatcaatgcacaccagatattcacttttcgccgcggcagctccggttttaagcgcaatggctttcccctggttttgcgccagatgaatgacccgcaaatggggaatttgtgcagccatgcgatccaggatggcacgggttttatctgttgaaccgtcatttacggcaataacttcaatgttctcataacgctgtgctaaagcggcgtgtatggtttcctcaacgtttttctcctcattaaaacagggaatgataatggagatagacggattatctttcaactggggagctggtgcgttttctccccacggccagtggcgttcacgatagacccagaaatagacgccgccaacaatccacataatggacataaaaaacggccagaagaaaacgaacctcatcatcagttcaccagagtgaaagtacgctacgcataggggtatgcataacaccagacataatataaaaaacgatacgatgcgattaatcatttttcggataccaggctgttgaaaactcaggacgaataaggtctatttcaggttggttatgcagaaaattgtcgggataataaccatagtttttcactccattcagttgtaataggctcatccagtgagcgagttgttgcgaagaaatagcctgatgctgaccatttttctgccagttttgtgcctgtaattctaaaatagatttgtctttagcctgagggatgtttttaatttgattggtcaattgtattaaccattggtcagccgatttttctgcgacaccttccagataaggcatagccataatagcggtccagtcatagctttttaggaaatcagcataattctgtgcaaaccaggcttcactttcaggttgtattaccggaagtgcaaaaatatttcgtgcagttttaatatgtggaccgcgaatggcttttacgcgcgcactaagttctaaagtgaagtcagttaacgcacgattttaaagcgggcccactgtttaaattgctccgggttttgtcgaatttcgctcagactcccgctaaagcctgcttgctgataagccgtgatagccggtgcactggcatcttcataatctgaaagcaaagcatcatcgtggaacaatatgccatcaaaagcagcatgtccggcaagatcttcatataacatgccaacttgtgctctgactctgtcatcgaaaggagagagacggtgatattgttcaggatgaatttgtgcttttttctcccctgttggtaagtattttactcgcgttaatgtgggatctaaatcccagcttaataccggcatccacgcatagatgtttacacctgagcgggtacgtaattgccaggcaacccgactaaaaatatctgctttcattggtagcaaacgatttggaaaccagacctctttgaccagcccatcaccatcgggatcagcaaatgcctgcaaatacacggttgatatttgcatatctttcacccgctgaattagcacatcaatattgcgatccatttgctggaggttttcgtcataaacgtaatcaagatcgatatgcattatccgttgtggtgatttttcctgtacggtaataatttgctgggcaaactcttttaatgagggattattggcgattaatacccgcggaatggaatccaattgcgacgcatttgccaaacctgattcaagggtgaagaacatgtcataaccgagtttttttaattcctctatcgctatgccattcgcttcgccataaggccaaacaaaaacgtgtggatttacctcaacctttgtacgcaggtattccgtcatttttacagcatccagacgaattctttcccggtattctgctgcggtttcataccgtgcgtggtcagtaaaatatgcacgatttacatatacaggcaataagctgccggtggcattagcctgaataccgtagtgagaattccatgtatgagaagcgagctcaacgagccgggaacgcgcaacttctcgcacttgttgccacgtggcaaaatattctcgatcgaccaactcatcgccaaattttacttgtttatccgctggcgtatcgacccaactgccgacgggggcccatacagcaggccactggaaggcctgaagaattgggaagacgcgggtataaaaactctggtagccgtcatcaaaagtcagcactacagctttttccggtagcggttttcctcctcgatgtgcttcacgaatttgagcaatactgaccggttgataaccgttctcgcgcagccaggcaaattgttcacgcagtgctgatgtccgcactgacataaaacgctggtcggcagcttcgtcttcaacgttatgccatgaaatcgctacaaaaccattatgcggccacggttgctcggcgagtaaagattcgcgatcctgtggcggtataaatgatgttcttgactggctaatgcacgcggtgagcataattatactcaccagcatcaggagatatttatttccattacgtaacatatttatccttaaaatctgaatgtcatatcgaattcaacgtataagttgtgttctctgtcaccgtcataaggtcgtttttcccagcgtagcgttgcgccagcatcaatcacgtcattccaactaatgcgttgcccgtagccgagttgggtgacgacatccgtgccataatgtttttgccaggaggcaccaacacctgcgctgaatatttgctcccagctattttcatagcttcgccataacaaatggcttgcctcaaatgccggaacaatatcgaacgtttttatagggttgtagtatggggtatcgtgttctgtattttgttcgtaatacagactgggtaggaaatcgacaatcaaatatggtgaagaccagatgcgttcctgaccctcaagtgagacttcatgacgctggttactgtcggaaaaatcagtgaaagcccaggagacaccgtacttacgccgctcattttgataccagcgaacataagcctgagcactgttgcctgtaacaccatttttcattgcccgtaatggaacgcggtgagagaggcgttccagttgcgaaccaatacgccagttatcattaaaatcataccagccagacaggcgcgcgccgggtttatgctcatgattgaaaacgcgttcagcgtactctgcctcgagccagatattacgtgaccgccactcaacacccgcaagccagtcgcgaacaatcccttttccttcgctaaattgtccatcggcataaccgaatccagcaaaaccgcgccagttatccttcagcggtggtgaataaacgatggtggttaagtcgacatcatgtttaccactatccgggccttcggcatcaattcctgttgagccagcgatacgaagctctgcaagattatgtacatcaaccgcacgttttaatcgtacaacgccgggatcttgcggttcacgttcgacaacatcgtgcgttaagacagctgcctgctgccattcttgtaacgttaatgctgtccaggcttgttcaacctccagattaatattacgtggctcgatcacttctgctttttttaattcattttctgctgcacgaggccaaccgcgggcttgtaacacactcgcgtaatcaatgcgcagtccctgatttcctggtgcgttataagcaagctctctggctgtcatttcagcctgaggaagatcattactatattttgctacggttgagagaaacgaatgcccctgtaaccaggtatcattcgggatgctcgtaggcgtgcccattaaccgaaggaaaggcggcgaagtattaatggtatgttgggtgacagttagcgcgcccggataattttcactctccaggtggctgtaaaagagatccgcaagttcttcatcggataaatccggggcaatggtctccttgtgataaaagagctcggtcattattgactgtgcttttttcggctgatgatctttgagataagccgatgcaacccaatattgcccccagggcggaataatttgccccgtcttttttaatcgctgatagtgagaaataacgtctttataacgatcgcgagttaataacgcgccaagatgatcaacctgaatacgctggtactgggcagtgcggtctgggttatcgtgccacagaatttctaatgcagcgtattgggcgagggcgcgatcggcaatggcataacgttcactttcactgcgcgtaggcataaacgacagtctgaccagttcggcatgaatatcagcgcgaatatctggcgttaaattggcatcgtcaatcgcggcagcaagttgattattacgtaatgcctgcacgtattctgtgggatattgttgcgtagatgcattttcaggtaatgactctgtcatcgcccgtaattcatcctgatgacgccccgccagtttatagatataggcttctgcgagtaaattggctttgtccggtgctccagagttaagctgcttaagtttaaccagcgcagtatcatagtgaccagcatctgccagggttaaaatttgtccccgttgataatccttattttgcggctccagagagagcgccttttgccacagtgtaagcgagttttgccattgttgcaggttacgataagcgacggcgacagctgcataaccacgcgctggtaattgctgatgacggtagcggttgtaaacggtaataacctgtttatcttgcccggcccataaggcaatctgtaaccagtcagcaatttggttattgctgagtgctgattttagtgcaaaccatgacaaagctggctgagtattacccttgcgagcttcaataatcaatgcatcataggcgttattaacagcactcttcgccgcgggactcgctgctaaaaatgcggcagtaagaagtttcaaagcccatttggttttcgggcacctttttctgctacttgaatacatcctgtattactccatgtattgccaaaatctctctctgtatctaattacaggtaactgaaaagaaagatatttttgcacctcataatccgttattaaacgcggaagagagacgtgaattgttgatgatgagaagaagaaatgatgagcagagtgtccatataaaatccttttctcgcccgaaaatccattccaatgatgaggatcttcaggaatacggcataaatcccaatgcctttttcaaaataaattaggattaaaataattaaatcagtaaattccgatgcatgatttcggatttttcgaaagtcctgatgaaaggctgcgctacggcactcacggatttaattgttattcctaatgtatctatgaattaatgttttataaggattttctataaccatttataagtattttcaagcctggcttgttgcaaacaatgtataaagcacttaggcaataataattacattcagcaactatcatcatcggtattgtttgtgggcggaatttcatattgacaacagtacagttcttatatctattaataatagaaagggatctacaacctacagattggtgtagctttatggaaaaagactatttgagaattagtagtactgtattagtgagcttattgtttgggcttgctttggttttggtgaatagttggtttaatcagccaggcgttgaggaagttgttccacgatcaacctatctgatggtaatgattgctttattttttatcgatactgttgcatttatttttatgcagttgtatttcatttatgaccgtaggcaattttcaaactgtgtacttagtttggcttttctgagttgtttgatttactttgttataaccgtcattatcattcagcaaattattgaggagcgtttgacaagcagtgttgtccaaaatgacattgcaatctattatttgtttcgtcagatgagtttgtgcatattaatatttctggtattggtgaataaagttagtgaaaacacaaaacagcgcaatttattttccaaaaaaatgactttgtgcataagtttgttttttgtttttggggggccgatagttgctcacatactttctagtcattatgagagctacaatttacacattgccgagttaaccaatgaaaatggtcaggtggtttggaaagcctcatatgttaccataatgattttcatgtggttaaccttgctttcggttaatctatactttaatggtttacgctatgatatctggaatggagtgacggtgattgctttttgtgccgtactgtacaatatctctctgttatttatgagcaggtatagcgtgtccacttggtatattagtcgcactattgaagtagtcagtaagttaaccgttatggtaatatttatgtgccatatattcagtgcgctacgagtaacaaagaacattgcacatcgcgatcccttaaccaatatatttaacagaaattatttttttaatgaactgacagttcaatcagcatcagcccaaaaaacgccttattgcgtcatgattatggatatcgaccacttcaaaaaagtcaacgacacctgggggcatccggttggcgatcaggtgataaaaacagtggtgaatatcattgggaaaagcatacgaccagatgaccttttagcgcgcgtcggcggcgaagagtttggcgtcttgctgacggacatcgatactgaacgtgcgaaagctttagcggaaaggattcgggaaaatgttgagcgtttaactggcgataatcctgaatacgctataccacaaaaagtgacgattagtattggcgctgttgtgactcaggaaaatgcgttaaacccaaatgagatctatcgactggctgataacgcactttacgaggcgaaagagaccgggcgtaataaggtggttgtgagggatgtggtgaatttttgtgagtcaccataaagcggcattttgatcctacccacgtaatatggacacaggcctaagcgaggttcttgttttcaaattgttccggactgaggccgccacaccaactgtgccgccgccaccgattgtaatcacattcgatataattaaacaccgttgcccgcattatttcccggctgataaagtgttctccatggatacattccactttcagcgaatgaaagaagctttccacgcaggcattatcgtagcagcaaccttttgcgctcatacttccacgcagattatgccgcttcagttgcgcctgataatctgctgaacagtactggcctccacggtccgtgtgaacgataacgttccggggcctcttacgccgccacagcgccatctgcagggcatcgcaggccagttgcgccgtcatgcgtggcgacattgaccagccaataacggcacgtgaccacaggtcaatgaccactgccagatacagccagccttcatctgtacgtaagtacgtgatgtctcctgcccacttctggttcgggccactggcgtaaaaatcctgctccaacagattttctgacacaggcaggccgtgtgcgcggtagctgaccgggctgaacttccgggaggcctttgccctcagtccctgacggcgcaggcttgccgccacggtttttacgttaaaggggtaaccctgagcacgcagttcatccgtcaggcgtggggcaccgtaacgctgttttgaccgggtaaaagccgcgaggacaacgctgtcgcagtgttggcggaactgctgacgcgtgcttatccttgtccgccgctgacaccacgtataccagccgctgcgggccacccggagcacgcggcacattgctttgatgctgaactcagcctgatgtttttcaataaagacatacttcatttcaggcgcttcgcgaagtatgtcgcggccttttggaggatagccagctcttcatcccgttctgccagctggcgtttgagacgtgcaatctcggtagacatctccagttcacgttcagaagacgtctgctgattttgctgtttactgcgccagttgtagagttgtgattcatacaggctgagttcacgggctgcggcagtaacaccgatgcgttcagcaagcttcagggcttcactgcgaaattcaggcgaatgctgtttacggggttttttactggttgatactgtttttgtcatgtgagtcacctctgactgagagtttactcacttagccgcgtgtccactattgctgggtaagatcagtgcctggcacacgcgtttgatggaagacggcgttcaggcaatgcgcgattatcttgccggactggatatcgcttcgccagagcatcaggttctgatgaacgtaacagcaaaaagcgaggtcgctccgtcaattatcaaagaaaatctctcattacacttaactcatacggtgaaatggactgaatctctcgatacatttctgaatatgccaaccccggtagctttccttgaaataagtaataagccctatttggggaatatgttaaatgattttgctggcgtggatcagcaacgagttatgcattgtcgtaaagcatttagtgatgcaaaggtattcaaatgattcctgattatttaacttttattcgctttcaggataaacgaaatctgatatacatttatgctattggacttattctgataggcttttattggaagaatgcagggtttacttttccatcagaggatattggtgtagttagtgggattctggctctggtgctgtataattttatttttgatctcaaggcgtactgggcttataaatgcgtcacgaagaatatcgatttttcgtggtttaagaaaaagcagaaccacaaaatagaattatttcttacacaacctctggtggcaggatttctgtcgttaatcatgttgagtgcaatgagttgggggctataccagcttctaccctcgttatatgcgctgttcctgatttcgttacttgggccgttggtcatctttctgctgtttcggatgatccgcaccagttatgtcaagcaggtcgctatttcagtagcgaaaaaagtaaaatataaaagtctgactcgctatgtgctgctttcggtgtgcatctcaacggttgttaacctgcttactatcagcccgttgcgtaacagtgattcttttgtgacagaggggcagtggttaacgtttaaatcgataattgcattgctcattctttgtggcgtagtgttggcgattaatctgttttttctgcgcttctccaagcggtacgcttttctgggcaggctttttttgcaggaaatcgatctgtttttctccagtgaaaatgcgttgtcgaccttttttgccaagccgctttggcttcggttattcatattgctggttattgaagtgatgtggattacgctggtgtcggtattggcaacgcttgtagaatggcggatttggtttgaagcctattttttactctgctatgtaccgtgcttaatttactattttttctattgtcgattcctctggcataacgattttatgatggcatgtgacatgtatttccgttgggggcattttaataagtgaggaagtgataggaagtgaccagataatacatatatgttctgtactctcttgcgcattttgattgttgactgagtaaccagacagttgatgtgcacgatttcccctcgccctaacagacgtgggcgggggcacccggtgtgtgcaatatacgaaaaaaaagcccgtactttcgtacgagctcttctttaaatatggcggtgagggggggattgactcgcttcgctcgccctgcgggcagcccgctcactgcgttcacggtctgtccaactggctgtcgccagttgtcgacccccggtcggggcttctcatccccccggtgtgtgcaatacacgaaaaaaaagcccgtactttcgtacgagctcttctttaaatatggcggtgagggggggattgactcgcttcgctcgccctgcgggcagcccgctcactgcgttcacggtctgtccaactggctgtcgccagttgtcgaaccccggtcggggcttctcatccccccggtgtgtgcaatatacgaaaaaaaagcccgtactttcgtacgagctcttctttaaatatggcggtgagggggggattcgaacccccgatacgttgccgtatacacactttccaggcgtgctccttcagccactcggacacctcaccaaattgtcgttcctgtcttgctggaacgggcgctaatttagggaaatcatgacctgaggtcaacaaactttttgaaaaaatcgcgcgtttattcaaacttcaatcaatgtgtggttttaataagcgaaatctgctttttttgccaccgaccacggatttgttatgctggtggcctttgtagatcataacgataagtgcgaataaatttcgcacaacgcttttcgggagtcagtatggatatcatcttttatcacccaacgttcgatacccaatggtggattgaggcactgcgcaaagctattcctcaggcaagagtcagagcatggaaaagcggagataatgactctgctgattatgctttagtctggcatcctcctgttgaaatgctggcagggcgcgatcttaaagcggtgttcgcactcggggccggtgttgattctattttgagcaagctacaggcacaccctgaaatgctgaacccttctgttccactttttcgcctggaagataccggtatgggcgagcaaatgcaggaatatgctgtcagtcaggtgctgcattggtttcgacgttttgacgattatcgcatccagcaaaatagttcgcattggcaaccgctgcctgaatatcatcgggaagattttaccatcggcattttgggcgcaggcgtactgggcagtaaagttgctcagagtctgcaaacctggcgctttccgctgcgttgctggagtcgaacccgtaaatcgtggcctggcgtgcaaagctttgccggacgggaagaactgtctgcatttctgagccaatgtcgggtattgattaatttgttaccgaatacccctgaaaccgtcggcattattaatcaacaattactcgaaaaattaccggatggcgcgtatctcctcaacctggcgcgtggtgttcatgttgtggaagatgacctgctcgcggcgctggatagcggcaaagttaaaggcgcaatgttggatgtttttaatcgtgaacccttaccgcctgaaagtccgctctggcaacatccacgcgtgacgataacaccacatgtcgccgcgattacccgtcccgctgaagctgtggagtacatttctcgcaccattgcccagctcgaaaaaggggagagggtctgcgggcaagtcgaccgcgcacgcggctactaataaagcatcaggattcctgctatccttggcgggaattgaatacaggagagagttatgtatcccgtcgaccttcatatgcataccgttgccagcacacatgcatatagcacattaagtgattacattgcccaggccaaacaaaagggcattaaactttttgcgatcaccgatcatggcccggatatggaagatgcgccgcatcactggcacttcattaacatgcgtatctggccgcgagtggttgatggggtagggatcctgcgcggcatcgaagctaacattaaaaatgttgatggtgaaattgactgcagcggtaaaatgtttgactcgctggatctaattattgccggttttcatgagccggtttttgcgccacatgacaaagcgaccaatacacaagcgatgatcgccactatcgccagcggcaatgtgcatataataagccatcccggaaatcccaaatatgaaatagatgtgaaagccgttgctgaagcagccgcgaaacatcaggtggcgctggaaatcaataattcctcatttttacactcacgtaagggcagtgaagacaactgtcgtgaggtagccgcagcggtacgtgatgctggaggttgggtggcattaggctcggattctcacaccgcgtttaccatgggggaatttgaagagtgtcttaaaatcctcgacgcggtagattttccgccagagcgcattttgaatgtttctccgcgccgcttactgaacttccttgaatctcgcggtatggcaccgattgcggaatttgcagacctttaattactagtaatggaaatatattaatgaacgagttttctatcctctgtcgtgtgctgggttcgctctattaccgccaaccacaagatcctttactggtgccgctgtttaccctgattcgtgaggggaaactggctgcgaactggccactggagcaggatgagttgctgacacgtttgcagaaaagctgtgatatgacgcaagtctctgccgattacaatgcgttgtttatcggcgatgaatgtgctgtgccgccatatcgtagcgcatgggttgagggcgcgacggaagcggaagtgcgcgcttttctttctgagcgagggatgccattagcggatacgccagccgatcacatcggcacattgctgctcgcagcttcctggctggaagatcagtcaacggaagatgagagcgaagcactggaaacactgttcagtgagtatctgttaccctggtgtggtgcgttccttggcaaagtggaggcccatgcaaccacgcctttctggcgcaccatggcaccgctaacccgcgatgccattagtgcaatgtgggacgagctggaagaagattctgaagaataagtgtgatctacgtcactcataactgcaacggataatttgttgttgcataaaatgtgtgctcgatctcattcatggccgcgttttctgctatcatgcgcggcatgaacatacttctctctattgcaatcacaacaggcattctctccggtatctggggatgggtggctgtttccctgggcttactaagctgggcgggcttcctgggctgtacggcctactttgcctgcccgcaaggtgggctgaaagggctggcgatctccgctgcaaccctgcttagtggcgtggtgtgggcgatggtcattatttacggtagtgcactggcaccacatctggaaattctcggttatgtcataaccggtattgtcgcgtttctgatgtgtattcaggccaaacagctgctgctttcatttgttccggggacgtttataggcgcatgcgcgacgtttgccgggcagggtgactggaaactggtgttaccttcgctggcgcttgggctgatatttggttacgcaatgaaaaacagtggcctgtggctggcggcgcgtagtgcaaagacggcgcaccgtgagcaggaaatcaaaaataaagcgtgaggggcactcacgctttcgcttaaacagtaaaatgccggatgataattccggcttttttatctgtcaggattccggtggaaccgacatatggcggtatttcaccagaatgtcattctgccgttctgctttattttgcaaatcccacagaccacggtcgataccatcattaatcaggaaaatgacccctgtttcgatagccgacatcaggcacagcataacaggttcgttcgaggtgtaacccacttccccttcaagcaagcgctggtagtcaataaagcggaaaaccccggcctgaacttcataggaaagtatcgtcttactggtgttcaccgaagaaaggatctcgccggtactcacattgacgacgcgcaggttcacggcaatctgatcgagctggtattgcgtgtcggcaccgatgccaaaatatcttgccccaaccccgccagatttgacgttgctttcataaccgataatcgaaccttcaaccatgatatttgccgccgttaaagattgcagcgggattcggttattaatggcaaccgtgccgttttcttgtgccgcacgaataatcttgcgctcgttaagcaggttttgtaagccctggcgctccagcggtataaaccagcgagaatctttcagtgccgtgaccagcattgccgtggcgctttgcggaacagcagtggagaagttacttgccgggtagggtttaaattgcccggtttcgtcctgaatgttgtataccgaaacaaagattttacccgtcggcgctggcagatgggtcaaatctttgtagctctgagcacgaggcattaatgtcggtctggcggcttctttaggcggggcggttaagcatccgctcagtaacatgacggcaaccaaaagaaataagcgctgcatgattattttccttatgaagctggggcttaaaaatcggttgagttattttgtaaacccgaaacctggatggtcgaggtttgtccggttttacgatctgtcacgttcaactgcaattgaccatcgcggttggcaatatcgacaatataatcgttggtcaccatgcggcccggtttaccggtattaatattcgacagtagcccacctaaaatttgtgactggatggcctgagtaaagttatctaacgctgagggtgtttcaataccaaagtcatcgttatagctcggatctttataagagttttgggcctgagcgctatttaataaaaaagcgccattatttgggttaccaccaaagtttggattacggaactggaaagtcatggttccagcccaacttaatggcgaaataagcatgagtagaactactgcatgtttgacacgcattgcagcctccgaacaattttttatttagaattcatcatgcgccaaatcgcccgtacttaataacgcctgatttatctggcgacgatttagtgcttcttcagtttgaatcagtgcaaagacgacagttttctcgaagtctcttttcaacggaaataaaaaagtctggaaaataacgtcctgattgaccgttatagtgatccagcttccccatcgtgcactgggcctttcattaatcgttaagttacccgtatagtcactttcccatttatcactaaaggctcggtaaaaatcatggccaatagatgaaacagtatggtcagttagcaatcccgggacttctacctcaacggcgtgaagattccctgcggcgaacagaaattctgccgccacaatccagcgtaaataacgtttcatggctttatcgcctgaggttatcgtttgcccaggaaaccgcttgtgtccggttttttacggctatcttcttgaaaagattataaagatgcgttttaaccgtattttcgctgatgaacaacgaacgagcgatctcgttattagacgcgccgatacgcagcttattcaggatctctttttcccgatgagtaaggagggctgattccgtgctgttataacgatagttacctgaatgcgtaatcaggtagctggcaagcttttgcgtaaagtagcattcgccgcgcaggacgccttgcaacccattgacaacacgttcttgatcctccatggaataaaaaacgccgttgatatgaggccagttttcaatgtcgcggtacgggtaatcttcaggcgtatttagcaacaatattttgatattgttgtttttcctgctcaaagtatcctgccaataatggataagctttttatccgcttccatcatatccagaagaataatagagcctgaagagatatcgtccagagaacgttgaatattatgtaattttcctgtaattgccagcgattgtttaaggtgctgcaagagagctgtcgcctgcaaagaagatttagtgatcaacaataatgtatgaccatgaatactatggacttcattaaacatgatgaaaccccgctttttttattgatcgcacacctgacagctgcctctaaaatagaagcaccagaagtactgacagatgttgcactgctgtgtgtagtaataaatcagccctaaatgggtaaaatataaaactaatggattacatctgatttcaatctagccattacaaatcttaaatcaagtgttaaacatgtaactaaatgtaactcgttatattaaaatgttaaccttaaggttttattaagtttagaaatgatagaaaagttgtacatttggtttttattgcacaattttaaaaaatcatacaaatggtgataacttactaataatgcatataaaaaatatttcggtgtagtcctttcgtcatgtaaaacgttcttgttttttctccacacctccgtggacaattttttactgcaaaaagacgaggtttgtcacggcttgtgcgcaagacatatcgcagcaatcagcgacgggcaagaagaatgactgtctggtgctttttgatagcggaaaacggagatttaaaagaaaacaaaatatttttttgcgtagataacagcgtatttacgtgggttttaatactttggtatgaactaaaaaagaaaaatacaacgcgcgggtgagttattaaaaatatttccgcagacatactttccatcgtaacgcagcgttaacaaaatacaggttgcgttaacaaccaagttgaaatgatttaatttcttaaatgtacgaccaggtccagggtgacaacatgaaaaacaaattgttatttatgatgttaacaatactgggtgcgcctgggattgcagccgcagcaggttatgatttagctaattcagaatataacttcgcggtaaatgaattgagtaagtcttcatttaatcaggcagccataattggtcaagctgggactaataatagtgctcagttacggcagggaggctcaaaacttttggcggttgttgcgcaagaaggtagtagcaaccgggcaaagattgaccagacaggagattataaccttgcatatattgatcaggcgggcagtgccaacgatgccagtatttcgcaaggtgcttatggtaatactgcgatgattatccagaaaggttctggtaataaagcaaatattacacagtatggtactcaaaaaacggcaattgtagtgcagagacagtcgcaaatggctattcgcgtgacacaacgttaatttccattcgacttttaaatcaatccgatgggggttttacatgaaacttttaaaagtagcagcaattgcagcaatcgtattctccggtagcgctctggcaggtgttgttcctcagtacggcggcggcggtaaccacggtggtggcggtaataatagcggcccaaattctgagctgaacatttaccagtacggtggcggtaactctgcacttgctctgcaaactgatgcccgtaactctgacttgactattacccagcatggcggcggtaatggtgcagatgttggtcagggctcagatgacagctcaatcgatctgacccaacgtggcttcggtaacagcgctactcttgatcagtggaacggcaaaaattctgaaatgacggttaaacagttcggtggtggcaacggtgctgcagttgaccagactgcatctaactcctccgtcaacgtgactcaggttggctttggtaacaacgcgaccgctcatcagtactaatacatcatttgtattacagaaacagggcgcaagccctgttttttttcgggagaagaatatgaatacgttattactccttgcggcactttccagtcagataacctttaatacgacccagcaaggggatgtgtataccattattcctgaagtcactcttactcaatcttgtctgtgcagagtacaaatattgtccctgcgcgaaggcagttcagggcaaagtcagacgaagcaagaaaagaccctttcattgcctgctaatcaacccattgctttgacgaagttgagtttaaatatttccccggacgatcgggtgaaaatagttgttactgtttctgatggacagtcacttcatttatcacaacaatggccgccctcttcagaaaagtcttaatttgttgaaatatcgagcataagatgaatctggagagaatggtctgctgcgaatcagccaacctgaaagtatggataacacaacccttggatttgcccctatatttccagacatctgttatcacttaacccattacaagcccgctgccgcagatattcccgtggcgagcgataacccagcgcactatgcggatgccattcgttataatgctcgaacgcctctgcaaggttctttgctgccgttaacccgtctggtttgggcatgatactgatgtagtcacgctttatcgttttcacgaagctctctgctattccgttactctccggactccgcaccgccgtgttcttcggttcaagtcccaacatccgggcgaactggcgtgtttcattagcccggtagcatgaaccattatccgtcagccactccactggagacgacggaagatcgttgccgaagcggcgttccaccgctcccagcatgacgtcctgtactgtttcactgttgaagccgccggtagtgaccgcccagtgcagtgcctcacgatcacagcagtccagcgcgaacgtgacacgcagtctctctccgttatcacagcagaactcgaacccgtcagagcaccatcgctgattgctttctttcacggccactctgcctgtatgtgcccgtttcgatggcggtacagcaggttttcgctcaagcaacagcgcattctggcgcatgatccggtaaacacgtttggcattgatcgcaggcataccatcaagttctgcctgtctgcgaagcagcgcccatacccgacgataaccatacgttggcagctctccgataacatggtgtatacggagaagcacatccgtatcatcagtgtgacgactgcggcggccatccatccagtcatcggttcgtctgagaatgacgtgcaactgcgcacgcgacacccggagacaacggctgactaagcttactccccatccccgggcaataagggcgcgtgcgctatccacttttttgcccgtccatattcaacggcttctttgaggagttcattttccatcgttttcttgccgagcaggcgctggagttctttaatctgcttcatggcggcagcaagttcagaggcaggaacaacctgttctccggcggcgacagcagtaagacttccttcctggtattgcttacgccagagaaataactggctggctgctacaccatgttgccgggcaacgagggagaccgtcatccccggttcaaagctctgctgaacaattgcgatcttttcctgtgtggtacgccgtctgcgtttctccggccctaagacatcaatcatctgttctccaatgactagtctaaaaactagtattaagactatcacttatttaagtgatattggttgtctggagattcagggggccagtctaaccctcaaggatgactaatcattgaggaaatagaataaatgttcagaccttttttaaactctcttatgctcggcagtttgttttttccttttattgccattgctggaagcaccgtgcaagggggcgtgatccatttttatggccaaattgtggaaccggcatgtgacgtcagcacccagtcatcacccgtagaaatgaactgcccacagaatggttctattccgggcaaaacctactccagcaaagcgttaatgagcggcaatgtcaaaaacgcgcaaatagcctcagtaaaagtgcagtatcttgataaacagaaaaagctggctgtaatgaacatcgaatataactaagtttctgaacaactcacgttgctgagcagaaaaatgcgatttaaccaaaaagcctgctgtacacttaagaaacaagaaggtgtaaggaggcgttatgaaaacgcgtattcatgttgtgcagggtgatattaccaaactggccgttgatgtgattgtgaatgcggctaatccgtcattaatgggaggcggcggcgtcgatggggccattcatcgcgcagcgggtccggccctgctggatgcttgtttaaaagtcaggcaacagcagggcgattgccctacggggcatgccgttattacgcttgcaggcgatcttcccgctaaagccgtagtgcacaccgtcgggccagtctggcgtggtggtgaacaaaacgaagaccagcttttgcaggatgcctatctcaatagcctacgactggtggcggcaaacagctatacgtcagtggcttttcctgcaatcagtactggggtttatggttaccctcgtgcggcagcggctgaaatcgcagtaaaaaccgtttcagaatttattacccgtcacgctttacccgaacaggtatactttgtctgttatgatgaagaaaacgcccacctctacgaaagactccttacccaacaaggagatgaatgatttgccccggctggcgagcgcggtgctgccactgtgttcgcaacatcccggtcagtgtggcctttttcctctggagaaaagtctggatgcgtttgccgcccggtatcgtctggccgaaatggcagagcatacgctcgatgttcagtattacatctggcaggacgatatgtcgggtcggttactgttttccgccctgttagccgcagcaaagcgtggcgttcgcgtccgtttgttgctggacgacaacaatacgcccggacttgacgacattttacgcttgcttgacagtcatccacgcattgaagtccggctttttaatcctttctcgtttcgcttgctgcgtccgcttggttatatcaccgacttttcccgtcttaatcgccgtatgcacaataaaagtttcactgtcgatggcgtggtgaccctggtgggaggacgaaatattggtgatgcctattttggagcaggggaggagccacttttttcggatttagatgtcatggcaataggacccgtggtagaggacgttgccgatgatttcgcccgctactggtattgcaaatcggtttcacccttacagcaggtgctggatgtcccggagggtgaaatggcggatcgcatcgagttacccgcctcctggcataacgatgccatgacgcatcgttatttacgcaaaatggaatccagtccatttataaatcatctggttgatggaacattgccgcttatctgggcgaagacacgtttattaagtgatgatccggcgaaaggggagggcaaggcaaaacggcattcactgttaccgcagcgcctgttcgatatcatgggctcacccagtgaacgcatcgatattatctcttcctattttgtaccgacacgcgcaggtgtggcgcaactcttacggatggtgagaaaaggggtaaagattgcgatcctaaccaattctcttgccgctaacgatgttgctgtcgtccatgccggatacgcgcgctggcgcaaaaaattgctccgctatggcgtggaattatatgaactcaagccgacgcgtgaacaaagtagtacgttacacgatcgcggcataaccggtaattccggagccagcctgcatgctaaaacctttagcatcgatggtaaaacggtgtttatcggctctttcaatttcgatccgcgttcaacattgctcaatactgaaatgggcttcgtgatagagagcgaaacgctggcacagttaattgataaacgctttattcagagccagtatgatgcggcctggcagctccgtctggacaggtggggacggatcaactgggttgatcgtcatgcaaagaaagagattattctcaaaaaagaacccgccaccagtttctggaagcgggttatggtcagactggcgtcgatattgcccgtggaatggttattgtaaatgtggcttaacgggctggtgctttatcgttctcacgcttaacaaccggtttaccagagaacaaaaacttcagtaacgggatgcgcaaatgaatttcatacagaattatcgcaatccctactacaaatatcaggccacagagaaaaccaagccagttggaggtgatgtgcggtgtaatgtatgcgccgaaaaacagcgttaacgggtggtgaaccagatagataaacagcgatgcgttaacaaaataagtcacccgcgctgactggaagttaagcaaacggtggccaaaggagaagaccacattcaccatccacagaccgaggaccatggtgatcaccgactcggtttcgtacatccaggcatcgccactgccatagcgctggttgagtaaataagcgacaaacgccaatgctgctgcaagggtacagccacgagacggcgtggtaaacaaggctttaagatgagggaaaatgaaagccagtgcgccgaggataaagaacggcaaataaaacagcgtttgcatgacaataaaattgaacatgccattactcagaatgggcggatacacaataaaaatcgttcttcttattaccgcataaccgatgccgaggcataaaaaaatcaccgatagttttaccatcgagaattttttattcgttttatcagaattttctaaattatttctgatgcgcttaaatatccatacgcacagcgtcgtcatgaccactaacaccagtaaaaaccacaggtgtgatattaattcccaggccaacgtattatatttgtcatacaatgacagcccaggccaactttccgcttttcctttgacatattgcagcataataaattgcggtaatgtcagtagggggatggctgttaacatcgggatacctacacgttcgacacgtactttccaccattttttcaagggatagcgtaaaaaaagcatgtaggaaaagtagccggatataacgaaaaatacctgcatgcggaacgagtggatgaagtcattaaaaagggtcagccacaatgatgattcggcgctattcacatgccatgtatggctcgaatagattaaagaaatatgaaaaggtatccctaacaacatcagccaggcgcggatggagtcgaggaaatattcacgttgcgcgggtactgggttcatatatggttaactaatctcggatttttcgtcttatccctgtcgggttatgcctttaggcttgttgccatagtgacaccgacctgaccgcgccaggcgcaggcttcaaggtttttatgcatagcatcatcgctaccactaaccagaatggaagcgtctgtaagacggttgataaataaatttgctggcaaaccctacacgaagtcgatgcttctgtctttaggagaagcacggaaagtgaaaacggttgcaatcaggtgcttaatccatgagccagcgtgctgaacgataccgggattctgttgtcggaatggctggttatccattaaaatagatcggatcgatataagcacacaaagggggaagtgcttactaattatgaaacataaactacaaatgatgaaaatgcgttggttgagtgctgcagtaatgttaaccctgtatacatcttcaagctgggctttcagtattgatgatgtcgcaaagcaagctcaatctttagccgggaaaggctacgagacgcccaaaagcaacttgccctccgttttccgcgatatgaaatacgcggactatcagcagatccagtttaatcatgacaaagcgtactggaacaatctgaagaccccattcaaactcgagttctaccatcagggtatgtacttcgataccccggtcaaaataaatgaagtgactgccaccgcagtcaaacgaatcaaatacagcccggattatttcactttcggcgatgttcagcatgacaaagatacggtaaaagaccttggctttgccggttttaaagtgctttacccgatcaacagcaaagataaaaacgatgaaatcgtcagcatgctcggggccagctatttccgcgtgattggtgcaggtcaggtttatggcctttctgcccgcggcctggcaattgataccgccttgccatcgggtgaagaatttccgcgcttcaaagagttctggatcgagcgtccaaaaccgactgataaacgtttaaccatctatgcattgcttgactcgccgcgtgcgacaggtgcttacaaattcgtggttatgccagggcgtgacacggttgtggatgtgcagtcgaaaatctatctgcgcgataaagtcggcaaactgggggttgcaccgttaaccagtatgttcctgtttgggccgaaccaaccgtcgcctgcaaataactatcgtccggagttgcacgactctaacggtctctctatccatgccggtaatggcgaatggatctggcgtccgttgaataacccgaaacatttagcggtcagcagcttctccatggaaaacccgcaaggctttggtctgttgcagcgcggtcgtgatttctcccgctttgaagatctcgatgatcgttacgatctccgtccaagcgcatgggtgactccgaaaggggagtggggtaaaggcagcgttgagctggtggaaattccaaccaacgatgaaaccaacgataacatcgtcgcttactggacgccggatcagctgccggagccgggtaaagagatgaactttaaatacaccatcaccttcagccgtgatgaagacaaactgcatgcgccagataacgcatgggtgcaacaaacgcgtcgttcaacgggggatgtgaagcagtcgaacctgattcgccagcctgacggtactatcgcctttgtggtcgattttaccggcgcagagatgaaaaaactgccagaggataccccggtcacagcgcaaaccagcattggtgataatggtgagatagttgaaagcacggtgcgctataacccggttaccaaaggctggcgtctggtgatgcgtgtgaaagtgaaagatgccaagaaaaccactgaaatgcgtgctgcgctggtgaatgccgatcagacgttgagtgaaacctggagctaccagttacctgccaatgaataagacaactgagtacattgacgcaatgcccatcgccgcaagcgagaaagcggcattgccgaagactgatatccgcgccgttcatcaggcgctggatgccgaacaccgcacctgggcgcgggaggatgattccccgcaaggctcggtaaaggcgcgtctggaacaagcctggccagattcacttgctgatggacagttaattaaagacgacgaagggcgcgatcagctgaaggcgatgccagaagcaaaacgctcctcgatgtttcccgacccgtggcgtaccaacccggtaggccgtttctgggatcgcctgcgtggacgcgatgtcacgccgcgctatctggctcgtttgaccaaagaagagcaggagagcgagcaaaagtggcgtaccgtcggtaccatccgccgttacattctgttgatcctgacgctcgcgcaaactgtcgtcgcgacctggtatatgaagaccattcttccttatcagggttgggcgctgattaatcctatggatatggttggtcaggatttgtgggtttcctttatgcagcttctgccttatatgctgcaaaccggtatcctgatcctctttgcggtactgttctgttgggtgtccgccggattctggacggcgttaatgggcttcctgcaactgcttattggtcgcgataaatacagtatatctgcgtcaacagttggcgatgaaccattaaacccggagcatcgcacggcgttgatcatgcctatctgtaacgaagacgtgaaccgtgtttttgctggcctgcgtgcaacgtgggaatcagtaaaagccaccgggaatgccaaacactttgatgtctacattcttagtgacagttataacccggatatctgcgtcgcagagcaaaaagcctggatggagcttatcgctgaagtcggtggcgaaggtcagattttctatcgccgccgccgtcgccgcgtgaagcgtaaaagcggtaatatcgatgacttctgccgtcgctggggcagccagtacagctacatggtggtgctggatgctgactcggtaatgaccggtgattgtttgtgcgggctggtgcgcctgatggaagccaacccgaacgccgggatcattcagtcgtcgccgaaagcgtccggtatggatacgctgtatgcgcgctgtcagcagttcgcgacccgcgtgtatgggccactgtttacagccggtttgcacttctggcaacttggcgagtcgcactactggggacataacgcgattatccgcgtgaaaccgtttatcgagcactgcgcactggctccgctgccgggcgaaggttcctttgccggttcaatcctgtcacatgacttcgtggaagcggcgttgatgcgccgtgcaggttggggggtctggattgcttacgatctcccgggttcttatgaagaattgccgcctaacttgcttgatgagctaaaacgtgaccgccgatggtgccacggtaacctgatgaacttccgtctgttcctggtgaagggtatgcacccggttcaccgtgcggtgttcctgacgggcgtgatgtcttatctctccgctccgctgtggtttatgttcctcgcgctctctactgcattgcaggtagtgcatgcgttgaccgaaccgcaatacttcctgcaaccacggcagttgttcccagtgtggccgcagtggcgtcctgagctggcgattgcactttttgcttcgaccatggtgctgttgttcctgccgaagttattgagcattttgcttatctggtgcaaaggaacgaaagaatacggcggcttctggcgcgttacattatcgttgctgctggaagtgcttttttccgtgctgctggctccggtacgcatgctgttccatacggtcttcgttgtcagcgcgttccttggctgggaagtggtgtggaattcaccgcagcgtgatgatgactccacttcctggggtgaagcgttcaaacgccacggctcacagctgctgttagggttagtgtgggctgttgggatggcgtggctggatctgcgtttcctgttctggctggcaccgattgtcttctcgttgatcctgtcaccgtttgtttcggtgatttccagccgtgccaccgttggtctgcgcaccaaacgctggaaactgttcctgatcccggaagagtattcgccgccgcaggtgctggttgataccgatcggttccttgagatgaatcgtcaacgctcccttgatgatggctttatgcacgcagtgtttaacccgtcatttaacgctctggcaaccgcaatggcgaccgcgcgtcaccgcgccagtaaggtgctggaaatcgcccgtgaccgccacgttgaacaggcgctgaacgagacgccagagaagctgaatcgcgatcgtcgcctggtgctgctaagcgatccggtgacgatggcccgtctgcatttccgtgtctggaattccccggagagatattcttcatgggtgagttattacgaagggataaagctcaatccactggcattgcgtaaaccggatgcggcttcgcaataaaaacgtagttgcctgatgcgctacgcttatcaggcctacatcgttcctgcaatttattgattttgcaagactttgtgggtcggataaggcgttcacgccgcatccggcaaaaacaacgagccaataaaaataccggcgttatgccggtatttttttacgaaagaggtatcaaatgcgtttaattgtggtgagcatcatggtgaccttgctgagtggctgtggcagcattattagtcgcactataccggggcaggggcatggcaaccaatattatcccggtgtgcaatgggatgtgcgtgactccgcctggcgttatgtcacgatccttgatctgccattctctctggtttttgatactttactgctgccgatcgacattcatcatggcccgtatgagtgattaacgttcatcccactcatcagctgctgcgcgtccttcctcggtatccagcggtggctcaagctgaaattccccctcgtcccattcatgtaatgtattctcttcctgccactcctggcgtatctctatctcatcatagtcgccatcaaaaacactttgcgcggcttcaccgctaagcataggtaaacattcaccttcttccccttcgtcggcaaaaaactcaacttgccacatgatgtcgccgtcctgcaaaacgtatttttgggcattgaactgttgcacattcgcatcttcggcgtcgatgccggggttgtctgcaagaaattcttcgcgtgcagcgtcaatggcttcttcaagcgttgcgtacatggtcatcacgattctccctttgagttgatgaggtttcagggaaaaggatagctgattctccgcttttgcaagtatgaaaggcgaaaaatcagttcgatacctggggtattcgacgacgacgtagactgttccatgaatagactgcgttgaataacactacgccagcggtgacgagaaataccgctctgaaaccgtagttcgctgaaatcgctgctcccatcaatggtccggtaacgttgccaatatcacgaaacgattggttatagctgaagatacgcccggcgatctggttgctcgagttgtaaaccaacagtgtctgtacggcggggagtagtgcaccatcggcggcaccgagcaaaaaacgtaaaatcccaagttgcaatggcgtctgaacgtaagacattgggatcaacagcagtacagaaaagatcagcgctgtaatcaggatcttttcgggtccgattcgatcgccaagtttgccgagtcgtggtgcacttagcagagccgccacgcctggcaccgaggcgatcatgccactgataaaggcgacgttactgacgttacccgccagttcgcggacatacagcgtcagaatgggggcaattgagcccgtcgccacctggatgattaacgtagtgacaaacaggctgagtaccagtttcgggtttttaagtgatgtcaccacttcccgcatgtgcagcatctcttttttgctgaccggctggaatttttctctgatgcaaaacagggtgacgaaaaagcagagtatgagcacactggcggtaataaagaataccggacgtaagccgtagctatcggcgagcaggccgccagccattgggccgagcaacgcaccactaacgccgcctgtggagagcgtacccagcgcccagccgcttttattacgcggtacttgtgtggcgataagagcattagcgttggggacaaatccgccaagtaacccaagaagcgcccgcaggatcaaaaactgccagatattttgtgccagccccatcaacaccatcacgatgcccatgccgagggcagagcgtaatagcatgagttttcggcctttacggtcggcgagtccaccccaaaacggtgaggcgatggccgaaaataaaaatgtaatgctgaagacaataccggaccacatattcagggcggagtgaccggtaacgccaagctgctcaacgtagaggggtaagaagggcattaccagactgaaggcggcaccggtaagaaaacagcctagccaggcgacgatcaggtttcgtttccagtttataggggtgtcattttcacagggtgacatagcaatccgctgttggtgcgccaggcgcggtgaacataagaagaaaagataagcacactaattatgcgcccgacttccagggggcgcaatccagagagcttttatcgctaaatcagggggatttgctgtggtaatgccggatgccattctgaagcatccggcatgggagatttaatagcgtgaaggaacgccttccgggcgtgttttaaagcgacggtgtaaccacatatactgctctggtgccatcatgatgcatttttcgaccactttgttcatccacgcggcggtagtttcggcatcatccagtggcggagaacactctggcggcagcataatcaattgataccctttgccatctggcttacggcgtggaacgaagggcaccagacatgcgccggacatccgtgccagcatccaggttccggtcgtggtcgcagcctgctcaacggcaaacaacgggacgaaaacgcttgagcgcgggccgtaatcatgatccggtgcgtaccagaccacttcgccttttttcagggctttaatcatgccttttaaatctttgcggtcgagcatcgatttatttgagcgcaaacggccccaggtttgtagccagtcaatcagtggattatcgttcgggcgataaacgccaatacccggttcctgcataccaaactgccgcgcacccagctccagtgtcagaaaatggatgccaactaacaggatgccgcgtttttgcgcctgcacgtcacgaatgtgttccatgccgatcacttccgtccagcgggcgattcggcggtccggccagaaccacgccatgccggtttccatcaggcccatgccaacggattcgaaattcttcaccaccattttacggcgttcttgttcgctcatttccgggaagcacagttccaggttgcgatgcacaatttttgcgcgtcgtttcataaaacgtaacgccagttttcctaatccacaaccgaggcggtagataaccgggtagggcaattgcacgactaaccaaagtacgccaatacccaaccaggttaaccaataacgcggatgaagcagtgcggtggagaacttgggtagattcgtcatatcaatcctgtttttcaacctattcgggcaattgtatgtattgtcgcattttttcgcccgcaaccaaaatttgtggctgaagactgggcgaaattgccgcgcttgtaaataacaaataatttttaatgcgcaaatgtagcgtaaaatgtgtggatgttaattatcgataattgctatatcatgccgcggatttttactttcccatctcgcaggaaccgtacaccatgccagtgttacacaaccgcatttccaacgacgcgctaaaagccaaaatgttggctgagagcgaaccgcgaaccaccatttcgttttacaagtatttccacatcgccgatcctaaggcgacccgtgacgctttatatcagctgtttaccgcgctgaatgtttttgggcgagtgtatctggcgcatgagggcattaacgcgcaaatcagcgtacctgcgagcaatgttgaaacatttcgcgcgcagctctatgccttcgacccggctttagagggtttacgcctgaatatcgcgttggatgatgacgggaaatccttctgggtactgcgcatgaaggtacgcgatcgcattgttgccgacggtattgacgatcctcactttgatgccagcaatgttggtgagtatctgcaagcggcggaagtgaacgccatgcttgacgatcccgatgcactatttatcgacatgcgtaaccactatgagtatgaagtggggcactttgaaaacgcgctcgaaattccggcagataccttccgtgagcagctgccaaaagcagtcgagatgatgcaggcacataaagataaaaaaatcgtcatgtactgcaccggcggcattcgttgtgaaaaggccagtgcctggatgaaacataacggattcaacaaagtctggcatatcgagggcggaattattgaatacgcccgtaaggcgcgcgagcagggcttgccggtgcgttttattggcaaaaattttgtttttgacgagcggatgggcgaacgtatatcggatgagattatcgcgcattgccaccagtgcggcgcgccgtgcgacagccataccaactgtaaaaatgatggctgccacctgctgtttattcagtgtccagtatgcgcggaaaaatacaaaggttgttgtagtgagatttgctgcgaagaaagcgcgttaccgccagaagaacagcgacgccgtcgggcaggacgtgaaaatggcaataagatctttaataagtctcgtggacgtctgaatacaacactgtgcattcctgatccaacagaataaatatcattgccggatgcgtgccatccggcaacatttcacgcttacttctgctgtacgccttccactgaaataatcagatccacttcctgagaagctggacctaaatctgtcttgatattgaagtccttgagcttaattttgccttcggcctcgaagcctgcacgtttaccaccccatgggtcgtcgccctgaccaattaatttcgcttccagcgtgacgggtttggttacgccattcagcgtcagatcgccggtaatatccagttcgtcaccgtctttcttcacgctggtggaggtgaatgttgcctgtggatattttgcggtattgaggaaatctgcactgcgaagatgtttatcgcgttcggcgtgattagtatcgacgctggtggtgttaattgtcacattcactttatcggcagccggatttttttcgtcaaaggtaaaagtaccgtcgaaatctttaaaggtgccgtataaccagctatagccaaggtgctggatgcggaaattaacaaaggcgtgctgaccttctttgtcaattttgtaatcggcggcaaccgctgaaccggcagagaacatcagggacgcgaaggttaaaccaagcaggctttttttcattttttatactccatagtcagatgacgactttcccagcatgcgcttcagagtgtcgtctttatcgatgaaatgatgcttcagggccataaatccgtgcataacggacagtactacgacgctccacgcgagccaaaaatgcagggcaccggcaaagtctgcctgtgcgccagcgtcggcaagggtcgcggggacgtcaaaccagccaaaaacgctgatcggtttaccatcggcagttgagatcagatagccgctgatgccgatggcgaaaagcaataggtacaatgcgagatgtccagctcttgcggcaagacgagtcatgggcgaataactcggcagcggacccggcggtggagatatgacacgccacagaacgcgaataaccagccccatcattaacaaaataccgatgcttttatgcagttcgggtgctttgtgataccagccatcgtaataactgagcgtgaccatccacagacctaaagcaaacatgccgtagacaataattgcgcttagccaatggaaggccgcagatataacaccatagcgttcaggggtatttgtgaatgacataagtgcatccaaaacgaatttgcgagagaaagaaaatggcgtgtcggagaatgaattgcaacacaaaaataacaaattgaatgatatttatttttatttcaataattttgaattaataatgaaagaatcttcataagtttagtgggttcagcatcagagatgtctggtgagtgctgtagaagcaggaataatctcattcaatttttcacgctaaatgaaagggagattaaatatttgtcagtttatgtcagtgcggaaaactaaaaataaaacacatagatcagatccataattgccaacaatccccagagaaaaagataaagcatcagatgctcgcgaatattattgatgagatagtgcaacagccgacgcattaaatactcctgtaaaaacggcctcattctggaggccgtaatgatgattattggaagcgggaaagcctgaatggcgtcaaatcaaaatcgctttttttgtcttgcgcaaaatcggcagctatttcccctaaaactgacgcaaatttaaaaccgtgcccactcaggccggtaatgagcagtgtattatcgtggccgggtagggtatcgataataaaatcttcgtcaggcgaattatcataggtgcaggcagcgccgtacaggcagcaaccgatacccggcaatacattgcgcaagaacgggaaggcttctgacccatcactggccacttccgcaaacggaacacgttcatccgctgaatggataacctggcctccgttatgtttgccaatcttcaacgcgtcgttttctgccggaaaaccataatattgatcgccattgggcagttcaccggtaaacgccgggaatttattcttcacgctatagcggccatcggcctgataccaggcaaatactttgcgtacgggctggacaggcagctccgggagcaggtcttttacccatgttcccgcgcagacaatcgcttttttcgcctgatactcaccgtcagccgtttcaatagttacgccatcatcgtcatgacgaattgcggtgaccgggcagttgaacagttgcgcacagcccgcttccttcgccagttggatccaggttttaatcgccagttcgctgcgcaaaaaaccggaatcagtttcaaataagccgatgtagttgtccgggacgcgtatttccggccagcgggccataatcccttgcgcatcgagcttttcaacgttgagttgccattgttcggcgctgtgggcgacgttggcgagaaatgtggaatcagccgggccaaggttaatgacgccagagcgtacaaaaatgggatcttcttcgttgtggcgggagagttcatcccacagcgtttgcgcgcggaggaccagcgggacatacttttcgccttcaccataagcatggcgaattaatcgcgtatcgccgtggtggctgccgtgttgatgcggtggcatatgggcgtcggtcattagcacgtttaaaccggcgcgggttgcataatacccggcggcagcgcctacggaaccgctgccaataatgatgagatcgtatttcatttttttctctctgctctcatggtttaagcagagtaattaactgaatgcagatatacaacccagaaatggtaaaggcaccggtgaggtgccttttgggtggatggtcatgtcatgttaatgacgccgatactcgtttacctggaaatcaccggattcaattttggcgattcctgcttctaatatcgaaataaattgtctggcaacatcagtggttaaccagagcgtctgaccaacttcagtcccttcctgctcggacttatttggggtctggtagtgcaaacgcaacatcagcgcatcatagctatcaacggtgctgatgtcccaccctacgagcggatgagtctgaatgacttcattatttttttccatcatggccccctaattcgtgttactagacaacgttattcgaggttcaatgcgtttttatctgaagcaacttcagtataccaataagtaagggtattcaccgaatttttaaagggggaaacagataaatttctgcttttaagatttatatgaacaataaaacagcatgtcattcatatttttttagcatattgtgcaattattttgaggaagtgtagaaattttgtactcaaaattcgtaagtaaaataaaaaagccggggcgacccggcaaaaaaaatcactgcatattattcgctgacaaaccagtcatcggcgctttcccacgtttcctggagaatttcactaatgcgctgtttatcttcttttgtcgcgccaataaccgataaattattcgctgcggcataacgtaccgatacgtggccttcattatcaggaaacgcatactgaatacggcgggaaagttcgccagccagggcgtcaatagccccagctggcaatggagaagttttcgctatggtgacttcaattcgcataatagccccctgttgaatatactggttatttatacaggtaaaataacctaatgacaacaggaagctacgatttttattgtttaacggaccagcgtaccgtttccccggcgaggaatggcaccagcgtgtcatcagtcagtgcgatgctttcagcaacctgttgctcttcacgtaccagttcgatgaatgtgtcgttgaccggcaacccatagaactgcgggccgtttacagaacagaatgcttcaaagtgctgcaaagcattcatttcttcaaagacggtagcgtaactgcccagcgcggttggggcgttgaagcagcccgcgcagccgcaactgctctctttgcgatgacgtgcatgtggcgcagaatccgtaccgaggaatactcgattaaaaccgctggcgaccagttcacgcaatgcctgttggtgaatattacgtttgaggatgggtagacaatacaggtgcggacgcacgcctccaaccagcatatggttgcggttaaacatcagatgctgcggagtgatggtggcagccagccgttcatttccgtcacggacatagtcggcagcatctttggtggtgatgtgctcaaaaacgactttcagcgcagtcaggcgctggcgcagaggttccatcacgctttctataaagcgcgcttcacgatcaaaaatgtcgatatctgcatgtgtcacttcaccatgcaccagtagcggcataccgattttttccatgcgctcaagtaccggcatgattgcgtcaattgacgtcacgccgtggctggagttagtggttgcgtttgccgggtaaagttttgcagcggtgaacacgccttcgttaaatccgcgctccagctcattaggatccagcgaatctgttaaataacaggtcatcaatggggtgaaatcgtgcccggcaggtacggcgtcaagaatacgctggcgatacgccacggcagcctcaacggtggtcacgggcggagccagattgggcattacgatagcccgtccataaatttcgctggtatatggcacgacagtttttaacatgtcgccatcgcggaggtgaaggtgccagtcgtctgggcggcggatctttaatacctgggatggtgcagtcattaatctctatgctccggctgaagggatgtttttgccggacacaaaggataagcggaaacgttttcctttgcacgaaaaataaagggcgcgaatgcgccctcgtgattaatcagtaaatggaatgacaatttcgcctggcttcacttcaatgcctttcgccagttttttcgccattgcttcgccctggctgccatcttcgcgcaggacgtaagcaggttgctggttaaagtaattgcgtaatgcctggttcaaatagggaagcaacgtttgcatcaccgtttgcattttttccggttgtaccgtcgcatcgaccacttccatctctttcaggaagatcgcacctttttctttatcaaacacgggcagcgctttcagcttcagtttcatggtcgctttctgactaccgaacagggagttcatgtccagattggcgtctccggttagggtaaccttattcggctcttcgcgaccaatttggctggtcaggtttgtcagaacaatatgggcgtcagccacgccgggtaaaccgatatcttttgagaaattattatgtttcgcaagcgactggttaatttcttgttcggtgatggtgtattgggtgagttgattacagccaacgagcaggccactgacgatcaatgcagcggcaaataaaaacttgttcatggtagtcctcgacatgaaatctgcgtcaatatcctgacacaacgcagcatgtgtcaccagcgataaactcgccagcagaaaaaactgaaaacggcggcaacccgcgaatacaggctgccgcggcgggtcaggattaaatcgccattgatgataacaaattgatttgtgtctgtttcgccatattatcgcggtaatcagcaacgcggcttggccagttaattccggctaccagcgtcagattacgcagtagcgggaatagctgaatatcatcttccgaaagttcgccattcacggcgttcggtttgacgatcagtttgtccagcgcacgtaaatcatcgctgatattcttaatcagaccgtcagagtgggccagcaggtcggcaaaattacccgcgctggcctctttcttgtcgacgaaatatttgcgcgcggcgggagtagaaaactcatcaaatgccgatttggcaaaacgcggcaacagcagtttgttggcgtagccattgaccttgcgcagccactcttcaatggcaggggaacgtttgccggtcagtaacggtttgccgtcgagtttatcgacatagtgaacgatgtccatgctttctggcatatagcggctgtcatctttttgcagaatgggaacctgtttttgaccgaccatccgggtgggtgtttctgcgtcgtcgttgagcagaacatgtaattcgacggggatatttttcaggccgaaaatcatgcgggctttgaggcagtaagggcagtgatcgtaaatgtatagcttcacgtgactcctccatttggctgtcagttcactttcagtatgaaggagtcaggggggagtatcaaatcaggcgtcgcgttcaagcaaacgacgcgcggcgcgtttctggctaaactgccaacccagcgcaaggaaagtgaagatgccaataatgcccagcatcatccacggaagctctggctggtgcgccgatttgcccaggtcaaacagccagccgccaccgatataaccaatagcgccgccaatcgccagacccagacggctaaaccccatatagctgccgcgagctcttgcgtccgccagcgaagcacttaaggtttcacgcgcaggctcggcaatgatcgacccgatataaaacagacaaatcagggtgaaaagttgttgcaggccgctgaccatgcccaccggcatcatgcttaatgacattatcaacagcccagccatcaaccggtgttccagacgaaaatgcttttcactccagcgggcgatagggtagagcaacgttaacgacagacacgcttcaatggcatacatccatttaacggcagagggcgcgccagccacgtcgttgaccataattggcagcatcagcatcacttgtacagccagcatgtagtaacccgccagcgtcagaacataggtgacaaaacgcttgtcacgcatcacgcgggtcatgccttcgcgaacgggcgtgcgtacggtggagagtttccatgctggtaacaaccacgcattgaacgccgcacatagcacaaatagaactgcccctgtggcgcagaccaggcgaaagtcgtattgcaacagccagctccccaacaatgcgccaatgaccgcaccggcactgtcctgcatcatcaacagcgagaaaaaacgaccacgctgctgtggacggattaatttcaccaccagcgccgaacgcggcggatcaaacaacgtgccaccgagtcccgagagcaggcatgaaaaccacaatagccacggttcgtgggcgatacccattgtggcgaatccggcggcgcgcatcagcataccggtaacaatcatcggtttggcaccaaagcggtcggcaattgcaccgccgaaaatacccagaccttgctgaataaattggcgtagaccgagagcaataccgaccatgacggcggcccagcccatttgatcaacgaagcggatagagatcagcgggaagacaacaaagaaccccagcacgaccagcatattatcgatgagcaggaaatatttacccaggttcctcgcctgcgacacgcgggacatttcccctcccgggaaataaaagatgagcactttctattctgcattgccgctaagacttttcccatcacttcggggacaatatttttttatcaaaacgtcgctttgatagagagtttttatcaaatatgtgaataatgcagaaaatggcattttggacttttcacagggtctggttgcgcaggtatagtaatacttacagcgtattaaagacgttacgggaaggagtaggtatagaatgtttggctatcgcagtaacgtgccaaaagtgcgcttaaccacagaccgactggtcgtgcgtctggtgcatgatcgtgatgcctggcgtcttgcggattattacgcagagaatcgccatttcctcaagccctgggagccagtgcgcgacgaaagccactgttatccatcaggctggcaggccaggctggggatgattaacgaatttcataaacaaggttcagctttctactttggcttattcgacccggacgaaaaagagattattggcgttgccaatttttccaatgttgttcgtggctcttttcatgcctgctatctcggttattcgattgggcaaaaatggcagggcaaaggactcatgtttgaagccctgaccgcagccattcgttatatgcagcgcacccaacatattcatcgcattatggctaattatatgccgcacaataaacgcagcggtgatttactggcgcgactgggttttgaaaaagaaggctatgcgaaagactatctgttgattgatggacaatggcgcgatcacgtactgacggcattaactaccccagactggacgcccggccgctaaggagaatctcatgaaatatcaacttactgcccttgaagctcgcgtgattggttgcttgctggaaaagcaggtgaccacgccggagcaatacccgctctcagtcaatggtgtagtcacggcctgtaatcagaaaacgaaccgtgaaccggtcatgaatctgagtgaatccgaagtgcaggaacagctggataatctggtcaaacgtcattatctacgcacagtgagcggttttggtaatcgggtcaccaaatatgagcaacgtttttgtaattcagaatttggcgatctgaaactgagcgcagcggaagtggcgttaatcaccacgttgttattgcgtggtgcccagacgccaggtgaactgcgcagccgcgccgcgcgaatgtatgaattcagcgatatggcggaagtggagtcgacgctggaacaactggcaaatcgcgaagatggtccttttgtggtgcgtctggcccgcgaaccgggtaaacgcgaaaaccgctacatgcatcttttcagtggtgaggttgaagatcagccggcggtgacggatatgtcgaacgcggttgacggtgatttacaggcccgcgtcgaagccctggaaatcgaagtggcagaactgaaacagcgtcttgattcgttgctggcccatctgggagattaaagtgaaaaaattacgtatcggcgtagtgggattaggtggcattgcgcaaaaagcgtggttaccggtgctggcggcagcgtctgactggacgttacaaggagcctggtcgcctacgcgcgcgaaagccctgccaatttgtgaaagctggcgcattccttatgccgattcgttatccagccttgccgccagttgcgatgcggtttttgtgcattccagcaccgccagccactttgacgtggtcagtacgttactcaatgcgggggtacatgtctgtgtcgataaaccgctggcagaaaatctgcgcgatgctgaacggctggtggaactggcggcgcggaaaaaactgacgttgatggtcggttttaaccgtcgtttcgcaccactctacggtgagttaaaaacgcaactcgccaccgcagcctcgctaagaatggataaacatcgtagcaatagcgtcgggccacacgatctttatttcacgttgctggatgattatctgcatgtggtggataccgcgctgtggttgtcgggcggcaaagcctctctggatggcggtacgctactgactaacgacgctggcgaaatgctgtttgccgagcaccatttttcggctggtcctttgcagatcaccacctgtatgcatcgccgtgccggaagtcagcgtgaaaccgtgcaggccgtgactgacggtgcgctcatcgacattacggatatgcgcgaatggcgtgaggagcgcgggcagggcgtagtgcataaaccgattcctggttggcagagtacgcttgagcaacgtgggtttgtcggctgtgcgcggcacttcattgaatgtgtgcaaaaccagacagttccgcaaaccgccggcgaacaggccgtgctggcgcaacgtatcgttgacaagatctggcgcgatgcgatgagtgaataaaccctgtaacatctggcggtagcaattcaccataatccaggtagactattcgcctctttcagcgcctgccttgcaggcgttttgcccgtgggtctggattagaacaccgatgaatttattaaaatcgctggccgccgtcagctcgatgaccatgttttcgcgtgtgcttggcttcgcacgagacgcaattgtcgccagaatctttggcgcagggatggcaaccgacgcctttttcgtcgcttttaaacttcctaacttgttacgccgtatctttgccgaaggggcattttcccaggcatttgtaccgattctggcggaatataaaagtaagcagggtgaagacgccacgcgggtctttgtctcttatgtttctggcctgctgacacttgcgctggcggttgtgacggtcgctggcatgctcgccgcaccgtgggtgatcatggtgaccgcgccaggcttcgctgacacagctgacaaatttgccctgaccagccagctactaaagattacctttccctatatcttgctgatctccctggcgtcgctggtgggagcgattctgaatacgtggaaccgcttctcgattccggcgtttgctccaacactgcttaacatcagcatgattggtttcgcgctgtttgccgcaccgtactttaacccaccggtgctggcgctggcgtgggctgttacggtcggcggcgtcctgcagctggtgtatcagctaccgcacctgaagaagatcggcatgctggtcctgccgcgcattaacttccacgatgccggagcaatgcgcgtggtgaaacagatgggaccggcgatccttggcgtctctgtgagccagatctccttaatcatcaacaccatttttgcctcgtttcttgcttccggttcggtgtcttggatgtattacgccgaccgcttaatggagtttccgtccggtgtgctgggcgtggcgcttggcaccattttgctgccgtcgctgtcgaaaagttttgccagtggcaatcatgatgaatacaaccgtttgatggactgggggttgcgtctttgtttcctgttggcgctgccgagtgcggttgcgttgggcattctttccggtccgttgaccgtttcgctgttccagtacggtaaatttaccgcgtttgatgcgctgatgacccagcgggcgttaattgcctactcggtgggtttgattggcctgattgtagtgaaagtgttggctcctggcttttattcccgccaggacattaaaacgccagtgaaaattgccatcgttacgctgattttaacgcaattgatgaacctggcgtttattggtccgttgaaacatgccgggctgtcactttctattggtctggcggcgtgtctgaatgcttcgctgctttactggcagttgcgtaagcagaaaatctttaccccgcaacccggctggatggcgtttctgttgcgtctggtggtggcggtactggtgatgtctggcgtgcttttaggtatgttacatatcatgccggagtggtcattgggtaccatgccctggcgtttactgcgtttaatggcggtcgtgctggcggggattgccgcgtacttcgctgcactggcggtactgggcttcaaagttaaagaatttgcccgccggacggtgtaacaatgcattccggcctgcagtgcaggccggagataatcttcagatcgaaatctttttaccgccgcgatgggttgttgaggtctgaccgttcgccccatatagcgtcggttcctgatgcggtttcaacatttccagcgcctgttgattgcgctcaatctgtccttccagtaaccagccgttatgttgattcatttggcgtagttgctgcgttttcacagtaatttcctgccagcgttgactaatatcaacgctatttgctgtattgggttctttcctgcgtaactgttcgaggtaatccagcgtcgccagcagtgagcttttttgttctgtaatccattgcaactggctgccgttgatctgccccatagagagatgttgctgctcttgatccattaccgttttgagatcgttaagcacagcggacatctggtcgaggatctctgcaagacgtgtcatacgatcagttactctgcaagtcttgctgcgcttcgttgatcagcgcatcggcaattttgccggtgtccatttttagttcaccgttacgaatcgccagttttaacgcttcgacacgttcaagattgatatcactgctgccgggttgcatcagttttgcttgcgcgtcgcttaacgtcacactggtgctggtggaggcggttgtttttgccgcccggctgttcgttaccggcgcgtcagtggtttcgcgcggttgaacggtgcttacaggcttcagaggcgaagtgcgatcaatactcatggtttattcctcattgagggcgcttttatcatgtgttgcttatttatcggcaagggacgggtaatctttaacagcttacaggtttataagaatattcccatctgcatcaacaacgccgctgactacctgtcccgataccatgcgcacccgcgcattctgtgcgacggctgcattgttcagcgcctgaccttctgcgttggcgctaaacccatcaccgctggcgatcacattgacgcgttgtcccgcttttacccgccatgcctggcgaaactgggttaactggataggttgatcgggtgatagatcgcgcaggctaatggcatcaacaagttgattgatatccagcaccgtacgcggtggcagggtatccagccgtccgcgtttcagtttgacattgccagcttccagctttcctccccgcgcaatgggcatcgcggcaaccacataatttcctgtggcctgtacattaacctgtaaatatcgtttgtcgttaccgcagcgtgccaacacattcacattgccccacaggcgggaattattgctcatcgaaagcaatggctgctcgcatggcggtagtagattgggcgctgtacgaatagaaacacgaacctcatcacttacccccgcgagttgggcgctaaaaaagttgtgcaattgcgatgtgagattgctcgccgtacttaacggactgaacagtatcgcgatgatcgccacgctacgttttattatcagcattttcgcccccagccatttctacaacgtgaattgtacctgtccgcaatgaccatcaacggcataaatagcgacccattttgcgtttattccgccgataacgcgcgcgtaaaggcatttaagctgatggcagaattttgatacctgcggaggagatatgctcgataagctcgacgccgccttacgttttcaacaagaggcgctcaatctgcgcgcccagcgtcaggaagtgctggcagcaaacatcgccaatgccgatacccctggttatcaggcgcgcgatatcgattttgccagtgaacttaaaaaagtcatgcaacgtggacgggatgcaaccagtgtggttgcactgacgatgacctcaacgcaacacattccggcgcaggcgctgacgcctcctaccgcagaactgcaataccgtattccggaccagccttcgcttgacggtaataccgtcgatatggatcgcgaacgcacccagtttgccgataacagcctgcaataccagatgagccttagcgcgttgagcgggcaaatcaaaggcatgatgaacgttttacagagcggaaattaacggatggcactgctgaatatttttgatatcgccgggtcggcgttaactgcccagtcccagcgcctgaacgtggcggccagtaatctggcgaatgctgatagcgtgaccggtcccgatggacagccatatcgggcaaaacaggtggtattccaggttaacgctgcaccaggtgctgcgacaggcggcgtaaaggttgccgatgttatagaaagtcaggccccggacaaactggtttatgaaccgggtaatccgctggcagatgcaaagggctacgtaaaaatgccgaacgttgatgttgtcggagagatggttaacaccatgtcggcgtcacgcagctatcaggccaatgttgaagtgctcaacacggtgaaaagcatgatgctgaaaacccttacgctcggtcaataaaggagaaagctatgtccattgcggtaaccaccaccgatccgacaaataccggcgtcagtaccaccagcagtagttcgctcacgggcagcaacgccgcagatttacaaagcagttttctgactttgctggtggcgcagctgaaaaaccaggacccgaccaatccaatggaaaacaacgagctgacgtcgcaattggcacaaatcagcacggtcagcgggattgaaaaactcaataccacgctcggatctatttccggacagattgataacagccagtcgttacaggccagtaacctgatcggtcacggcgtgatgatccccggcaccactgttcttgcgggaaccggcagtgaagaaggggctgtgaccacgaccacgccgtttggtgttgagctgcaacaggcggcagacaaagttacggccaccatcaccgataaaaatggcgcggttgtgcgcaccattgatattggtgaactgaccgccggagttcacagtttcacctgggacggtacgttgactgatggcagcactgcgccgaacggttcttacaatgtagcgattagcgccagtaacggtggtacacaactggttgcccagccgctgcagtttgctctggtgcagggtgtgatccgcggcaacagcggtaatacgctggatctcggcacttacggcaccaccaccctcgacgaagtacggcagataatttaagccttcacatttcaggagtcagtcatggccttttctcaagcggttagcggattaaacgctgccgccaccaacctcgatgttattggcaacaatatcgccaactccgccacctacggctttaaatcaggcacggcctcttttgccgatatgtttgccggttcgaaagtgggactgggggtaaaagttgccggtatcactcaggactttaccgatggcacgaccaccaacaccgggcgaggtctggacgttgctatcagccagaacggttttttccgtctggtagacagcaacggttcggtgttctacagccgtaacggacaatttaagctggatgaaaaccgtaacctggtgaatatgcaaggtttacagctgacgggttacccggcaaccggtacgccgccgactattcagcaaggggcgaatccgaccaatatttcgatcccgaataccctgatggcagcgaaaactaccaccacggcatcgatgcagatcaacctgaattccagtgatccgcttcctactgttacgccattcagcgccagcaatgcggatagctataacaaaaaaggttcggtgactgttttcgacagtcagggtaatgctcatgacatgagcgtctactttgtgaagaccggggataataactggcaggtctacacccaggatagcagtgatccaaacagcattgcgaagacagcgacaacactggaatttaatgctaatggcacattagtggatggtgcgatggcgaataatatcgcaaccggcgcaattaacggtgcagaacccgccacgtttagtctgagcttcctcaactccatgcagcaaaataccggcgctaacaatattgtggcaaccacccagaacggctacaaaccgggcgatctggtgagttatcaaatcaatgatgacggtacggttgtcggcaactattccaacgaacaaacccaactgctggggcagattgtactggcgaactttgccaacaacgaaggtctggcatccgaaggcgacaacgtctggtctgcgacgcaatcttctggcgtggcgctgttggggacagccgggacgggaaactttggcaccctgaccaacggtgcgctggaagcgtccaacgtcgatctcagtaaagaactggtcaatatgatcgttgcccagcgtaactatcagtctaacgcccagaccatcaaaacccaggaccagatcctcaacacgctggttaacttacgctaatcgctgacgggatagctcaatggatcacgcaatttataccgcgatgggagcagccagccagacactgaatcaacaggcggtaaccgccagtaatctggccaatgcctcaacgcccggttttcgcgcgcagttgaatgctttacgcgcggtgccagtggaagggctttctctgcccacgcgcacgttggtcacggcgtcaacgccgggcgcagatatgacgcccggcaaaatggattacacctcgcgcccgctggacgtcgcgttgcagcaggatggctggctggccgtgcagaccgctgacggcagcgaagggtatacgcgtaatggcagcattcaggttgatcccaccgggcaactgacaattcaggggcatccggtgataggcgaggctgggccaattgctgtgccggaaggggcggaaatcactattgctgccgatggcacaatctcggcgctcaatccgggcgatccggcaaatacggttgcgccagtagggcgtcttaaactggtgaaagccacgggcagcgaagtgcagcgcggtgacgacggcatttttcgtttaagcgcagaaacccaggccacgcgtgggccggtactgcaggcagatccaaccttgcgtgtgatgtcgggggttctggaaggcagtaacgtcaatgccgttgcggcaatgagcgacatgattgccagcgcgcggcgttttgaaatgcagatgaaggtgatcagcagcgtcgatgataacgcaggccgtgccaaccaactgctgtcgatgagttaattgaaaggatacatgacaagtataagttgcccgatgcgcaagtttatcgggtctatgggggcaatcgcaatttatcgattttgcgagcacttgtaggccggataaggcgtttacgccgcatccggcaagaagacatatgcactttgtcactaatccactacaggacattttatgatcagttcattatggatcgccaaaacgggccttgacgcccagcaaaccaatatggacgtcattgccaacaacctggcaaacgtcagtactaacggttttaagcgtcagcgcgcggtgtttgaagatctgctttatcaaaccattcgccagccgggggcacagtcttccgaacaaaccaccttaccctccggattacaaatcggcacgggggtacgcccggtcgccactgaacgcttacacagccagggaaacctgtcgcagaccaacaacagcaaagatgtcgcgattaaagggcagggctttttccaggtgatgttgccagatggttcatcagcctatacccgtgacggctctttccaggtggatcagaacgggcagctggtgacggctggtggttttcaggtgcagccagcgatcaccattccggcgaatgcgttaagtatcaccatcggtcgtgatggcgtggtcagcgtaacccaacaaggccaggcagctccggttcaggttgggcagctcaatctcaccacctttatgaatgacaccgggctggagagcattggcgaaaacctctacaccgaaacgcaatcctctggtgcaccgaacgaaagcacgccgggcctgaacggcgcgggactgctgtatcaagggtatgttgaaacgtctaacgtcaacgtggcggaagaactggtcaatatgattcaggtgcaacgcgcttacgaaatcaacagtaaagcggtgtccaccaccgatcagatgctgcaaaaactgacgcaactctaaggcttaaccggtggcaggttcaccggtttactgatttttgaagatgatagccatgcaaaaaaacgctgcgcatacttatgccatttccagcttgttggtgctttcactaaccggctgcgcctggataccctccacgccgctggtgcagggggcgaccagtgcacaaccggttcccggtccgacgcccgtcgccaacggttctattttccagtctgctcagccgattaactatggctatcaaccgctgtttgaagatcgtcgaccacgcaatattggcgatacgctgaccatcgtgttgcaggagaacgtcagcgccagcaaaagctcctctgcgaatgccagccgtgacggtaaaactaattttggctttgatactgtgccgcgctatttgcaggggctgtttggtaacgctcgtgccgatgtcgaagcctccggtggtaacacgttcaacggaaagggcggggccaatgccagcaatacctttagcggcacgttgacggtgacggttgaccaggtactggtcaacggcaacctgcatgtggtgggtgaaaaacagattgccattaatcagggtaccgaatttattcgcttctctggcgtggttaatccacgcactatcagcggcagcaataccgtaccgtctactcaggtggcggatgcgcgcattgaatacgtaggcaatggctacattaacgaagcgcaaaatatgggctggttgcagcgtttcttccttaacctgtcgccaatgtaagtgaggctgtggtgattaaatttctctctgcattaattcttctactggtcacgacggcggctcaggctgagcgtattcgcgatctcaccagtgttcagggggtaaggcaaaactcactgattggctatggtctggtggtggggctggatggcaccggtgaccagacaacccagacgccgtttaccacacaaacgcttaataacatgctctcacagctgggaattaccgttccgacgggcaccaatatgcagctaaaaaacgtcgctgcggtaatggtgacagcgtcacttcctccgtttggacgtcaggggcaaaccatcgatgtggtggtttcttccatgggaaatgccaaaagcttgcgtggaggtacgttgttgatgacaccgcttaagggcgttgacagtcaggtgtatgcgctggcgcagggcaatattctggttggcggcgcaggagcctccgctggcggtagcagtgttcaggttaaccaactgaacggtggacggatcaccaatggtgcggttattgaacgtgaattgcccagccagtttggcgtcgggaatacccttaatttgcaacttaacgacgaagatttcagcatggcgcagcaaatcgctgacaccatcaaccgcgtgcgtggatatggcagcgccaccgcgttagatgcgcggactattcaggtgcgcgtaccgagtggcaacagttcccaggtccgcttccttgccgatattcagaatatgcaggttaatgtcaccccgcaggacgctaaagtagtgattaactcgcgcaccggttcggtggtgatgaatcgcgaagtgaccctcgacagctgcgcggtagcgcaggggaatctctcagtaacagttaatcgtcaggccaatgtcagccagccagatacaccgtttggtggtggacagactgtggttactccacaaacgcagatcgatttacgccagagcggcggttcgctgcaaagcgtacgttccagcgccagcctcaataacgtggtgcgcgcgctcaatgcgctgggcgctacgccgatggatctgatgtccatactgcaatcaatgcaaagtgcgggatgtctgcgggcaaaactggaaatcatctgatgatcagcgacagcaaactactggcaagtgcggcctgggatgcgcaatcactcaacgaactaaaggcgaaagcgggcgaagatccggcggcaaatatccgtccggtggcccgtcaggtggaagggatgttcgtgcagatgatgttgaaaagcatgcgcgacgctttaccaaaagatggcctgttcagcagcgagcacactcgcctgtataccagtatgtatgaccagcagattgcccaacagatgacggcgggcaaaggtctggggcttgcagagatgatggttaaacagatgacgccagaacaaccattgccagaggagtccacgccagcagcaccgatgaaattcccgctcgaaactgtggtgcgttatcaaaatcaggcgctttcgcagctggtgcaaaaggccgtgccacgtaactacgatgattcgctgccgggtgacagtaaagcattcctcgcgcaactctcgctgcccgcccaactggcaagccagcaaagcggtgtgccacatcatttgatcctcgctcaggcggcactggaatctggttgggggcaacggcaaatccgccgcgaaaacggcgagccgagctataacctgtttggtgtcaaagcctctggcaactggaaagggccagttactgaaatcaccacgactgaatatgaaaacggcgaagcgaagaaagtaaaagcgaagtttcgcgtctacagctcgtatctggaagccttgtcggattacgttgggctgttaacgcgtaacccgcgctacgccgccgtgacgaccgccgcgagtgcggaacagggggcgcaggccctacaggacgcgggctatgccaccgatcctcactatgcccgcaaactcaccaacatgattcagcagatgaaatcgataagcgacaaggtgagcaaaacctacagtatgaacattgataatctgttctgaataactcaagtccggcgggtcgctgccgataatactctgtaattgaaggcttataaggaacctccatgtccagcttgattaataacgccatgagcggactgaacgcggcccaggcggcgttaaatacggcaagtaataatatctccagctataacgttgccggatatacccgccaaaccactattatggcgcaggccaatagcacgttgggcgctggcggctgggttggcaatggtgtctacgtttctggtgtgcagcgtgagtatgatgcgtttattaccaaccagttacgtgcggcgcagacgcaaagtagcggtctgactgcccgctatgagcagatgtcgaaaatcgacaatatgctctccaccagtacctcttcgctggcaacacagatgcaggatttcttcaccagcctgcaaacgctggtgagtaacgcggaagacccggcagcgcgccaggcgctgattgggaaatcagaaggattggtgaatcagtttaaaaccaccgatcaatatctgcgcgaccaggacaaacaggtcaatatcgcgataggtgccagcgttgatcagatcaacaactacgctaaacaaattgccagcctgaacgatcaaatctcgcgcctgacaggcgtgggggcaggggcgtcacctaacaatctgctggatcaacgcgatcaactggtgagcgaattaaaccagattgttggtgtagaagtcagcgttcaggatggcggcacttataacatcacgatggccaatggttactcactggttcagggaagtacggcgcggcaactggcggcagttccttccagcgctgacccttctcgtacgactgtcgcttatgttgatgggacggcaggcaatattgagatcccggagaaattactgaataccgggtcgctgggcggcattctgacattccgttctcaggatctggaccagacgcgtaatacgcttggacaactggcgctggcatttgccgaggctttcaacacccaacacaaagccggatttgatgctaacggcgatgccggtgaagatttctttgctatcggtaagcccgcggttctgcaaaacacgaaaaacaaaggtgacgttgcgatcggtgccacggtaactgatgcctccgcggtactggcgacagattacaaaatctcgttcgataataatcagtggcaggtcacccgccttgccagcaataccacttttacggtgacgccggatgccaacggtaaagtggcatttgatggtctggagttgacgtttacaggaacgcctgccgttaacgacagcttcacgctgaaaccagtaagtgacgccatcgtcaacatggatgtattaatcaccgacgaagcgaaaatagcgatggcgagcgaagaagatgcgggtgatagcgataaccgcaacggtcaggccctgctggatctgcaaagcaacagtaaaacggtgggcggtgcgaaatcctttaacgacgcttatgcctcgttagtgagtgatatcggtaataaaaccgcgacgttgaaaaccagtagcgccacgcaaggtaatgtggtgacgcagctttccaatcagcagcagtcgatttccggtgtcaatctcgatgaggagtacggaaatctgcaacgttttcagcagtattacctggcgaatgcgcaggttctgcagacggcaaacgcgatttttgatgcgctgattaacattcgctaaggggagataagatgcgtttcagtacacagatgatgtaccagcaaaacatgcgtggtatcaccaattctcaggcagaatggatgaagtacggcgaacagatgtcgacgggtaagcgagtcgttaacccttctgacgatcccattgctgcatcacaagccgtagttctctcccaggcacaggcgcaaaacagccagtacacgctggcgcgtactttcgccactcaaaaagtgtcactggaagagagtgtacttagccaggtcaccactgctatccagaatgctcaggaaaaaattgtctacgccagcaatggcaccttgagtgacgatgaccgggcctcgctggctacggatattcaggggcttcgtgaccagttgctgaatctggcaaacaccactgacggtaacgggcgctacatttttgccggttataaaacagagactgcgccgtttagcgaagagaaagggaaatacgtcggtggagcagaaagtattaaacaacaggtcgatgcttcgcgttcgatggtgatagggcacacgggtgacaaaattttcgacagtattaccagcaacgcggtagcggaaccagacggtagcgcttctgaaaccaatctttttgccatgctggatagtgccatcgcagccctgaaaacgccggtcgcggatagcgaagcggataaagaaaccgccgctgcggcgttagataaaaccaaccgcggactgaaaaactcgctgaacaatgtgctgactgttcgcgcggaattaggcacgcagctgaacgaactggagtcgctggattcattaggtagcgatcgcgctttagggcaaacgcagcagatgagcgatctggttgatgtggactggaatgcaactatttcatcttacatcatgcagcaaacggcattgcaggcatcgtataaagcatttaccgatatgcagggattgtcgctcttccagctcagcaaataatttcgctttaaaacatatcatgaaactgggtatgttttgtctgcctgctctgggatcgctggggcgggcatttttttgcctattttgcattgttggttagcaaggatgccattcgatgaattttaatatgttgattcaaagatgaaataaaaaagccctggcagttaccagggcttgattactttgagctaattattactcaacaggttgcggacgcgcaggagcggcagaggcatgatgtgttgccgtatgaccacctgcggcacctttaccttcgaaggcaaaagtagggcgctgccagtcactgtgacgcggtgcctccggaacatattccggtgctggagcgcgcgtcattggcgcggtagcgtggttatgctcaacggtgacctcaggttcgaccgcagctaccgtttcaacttctgctgcgacttcagcgactactggcgcggcaggttgagcaacaacttcaggttcagcaactacaacctcagcagtttcgacaacttcttcaatatctgccgtctcttcctgcggttcaaccaccggttctgcttgttctgcaacttcctgggctacggcaacatcagactcggtaatcacctgcggctgttcagttaccgcggcagcgatcacttcaggatgcgtcgtttcaaccacttccggttgcggttcggcaacctgaacgggggcttctacgacaccggccacttcttcaacaactggcgcgctaacaaccggttcgatagcggcggcgacagggacctcagtcaccatcggctgcacatgtacttcttcctgttcgcgctgctcttcaacctgtacatcttgcggacgtacaattggatagcggatccagactttgccagaggccagttccggagacgcgcacgctacggtcaacggcattggcgactgggttggataacgctcgtcacgatagcgacgacgacgctgaccacttacgcgcaggtgacgaggcgagcggcgagaacgacgcggcatgccaccgttgtcacggttatcagcattgttctcttcttgctgttctggtgcagtttgcgctacgactggcagcgggactttcaccagttctgtgcgtggagctggcgcttcctgaacaattggttcggcagcgacagtttcttcaaccaccggtgcgactaccgcttcttcggctacgctttgctcgtaacgcactttctgattgagctgacgctgtttacgacgcggctgaaccggacgtacacgttcttcctgttcggtttcctgaacagattgctcttcaacattcagcgccttcgcttcttgttgcgcctgacgtttatcatcattacggcggcggctacgttcacgacgcggcgcttgctgctcgtcggcggtacgcgctttttccgttacctcagcctgctgacggctctcacgcgtctcggcagtctgctgctgtgcctggcgacgattacgacggttttcttcgcgattatcgctgccttcagtacgttcactacgggtgtcgcggcgctcattacggtcacggcggttgttctgacgaggcttgcgacgatcctgttgacgttccggtttcgcttctgctttcggtgctggttgctcggtcggtttggtttcttcaccaccgctgaacagcgctttcagtgcgccgaagaagcggctcaacagcccaggttgtgcaggagctgctggtgttgccggtgcagctttcggtgctggagctacaacaggcgcggcaggttcagctggcgttggcgcaggcggcacatccggcatggcaaaggttgccagcgcaggttgttccggacgcttacgttcagcgaactcttcttcagacggcagcgccatcgcttcttcatgcagcttcggcagcatgtagcttaaggttggggtttcttcccctttacgcacgcgcagcacgtggtagtgcggggtttccatctgatcgtttggcacaattacacagcgcacaccgtcctgacgagtttcaatggcatttaccgcagaacgtttttcattcagcaggtaagaagcgattggcacaggaacaatggcgtgaacttcctgggtgttctctttcagcgcttcttcttcgatcagacgcagaatagagagcgacagcgattcgttgtcacgcacggtgccagtaccagaacaacgcggacaaacgtgatgactggattcacccagtgatgggctcaggcgctgacgggacatttccagcaggccaaagcgagaaatatggctgatttgaatacgcgcacggtcctgacgcaccgcttcacgcagacggttttctaccgcacgctggtggcgtactggcgtcatgtcgatgaagtcgataacaatcaggccgccgaggtcacgcaggcgcagctgacgagcaatctcatcggcagcttcgaggttagtgttaaacgcggtttcttcgatatcgccgccgcgggtcgcgcgtgcggagttgatgtcgatggccgttaacgcttcggtgctgtcgataacaatggaaccaccagacggcagacgaacttcacgctggaaggcggactcgatctgtgactcgatctggtagtggctgaacagcgggatctcgccggtgtacagtttgattttgctgctgaaatccgggcgacctaatgcagcgatatgctgacgtgccagttcgagcactttcgggttatcgataaggatttcgccgatgtcctgacgtaagtaatcgcggaatgcgcgaacgattacgttgctctcctgatgaatcaggaacggggccgggcggctttcagcggcttttttgatggcttcccagtgtttcagacggaagcttaaatcccattgcagcgcctcagcagatttgccgacgccagcggtgcgcacgataagccccatgccttccggcagttcaaggcttgccagtgcttcttttaattcggtacggtcgtcgccttcgatacggcgagaaatgccacccgcgcgcgggttgttcggcatcagaaccagatagctacccgccagactgataaaggtggttaatgccgcgcctttgttgccgcgctcttctttatcgatctgaacaatgacttcctgaccttcacgcaacacatctttaatgttgggacgaccatgagcactgtagttagcagggaaatattcgcgggcaatttcttttagtgggaggaaaccgtgacgttcagcgccgtaatcaacaaaagcagcttccagactcggttcaatgcgggtgattttacctttgtagatgtttgcctttttctgctcgtgccctggactttcgatatccaggtcatacagacgctgcccatctacaagggcaacgcgcaactcttcctgctgagttgcgttgattaacattcttttcatcgtaacttactcattattcttacattgacgactaagctgcgggcaaagtaacgcctttccgggtgtgaaccgatggcctcgtgtctagtcgcgtcgccaacctcacggttatcgtcagctcaaagaggcgcagagtgtcggttgcccgtttttcatgcggaaaaacagcgcaattatcaaagaaacagactgggtattactctccagaaatatttccatctaccggtaaggactgcaacccgcagcccgctaactgcctgaaagatcaatacgtcttacgccattgctgcgtggatgatcggtcgggcaaaatgggttattccgtaaaatttcttgttttaacaaggatggacacggaaacggcctcattattccactgcaagccttgttatagcaagatgacttttaccatttatcacccgcttactcacagttttttcacttcttgctggtgattggtttaataaccatcaataaagtgatcacgcagtgaagtaataaggtgcaaaagtaaatataagcatagaaaaatgagtggcgcgaatcctgttggctaattagaatcgccaaccatgaaaacagagactccatccgtaaaaattgttgctatcaccgctgacgaagcggggcaacgtatcgataactttttgcgtacccaattgaaaggcgtaccaaaaagtatgatttaccgtattttgcgtaaaggcgaagtgcgggtgaacaaaaaacgtattaagcctgaatataaactcgaagcgggtgatgaggtgcgtattccaccggttcgcgttgctgagcgggaagaagaggcggtttcgccacatctgcaaaaggtggcggcgctggcggacgtcatcttatatgaagatgatcacatcctggtgctgaataaaccttccggtacggcggtacatggcggcagtggtttaagcttcggcgttattgaaggtttgcgggcgttgcgcccggaagcgcggttccttgaactggttcatcgtcttgaccgggacacctcaggtgttttgctggtagcgaaaaaacgctcggcgttgcgttctctgcatgagcaattacgtgaaaaagggatgcaaaaagattacctggcgctggtgcgcggtcagtggcagtcgcatgtgaagagcgttcaagcaccgttactgaaaaatattctgcaaagcggcgaacgtatcgtgcgtgtgagtcaggaaggcaaaccgtcggaaacacgctttaaagtggaagaacgctatgcatttgccaccctggtgcgttgtagcccggtaacagggcgtactcaccagatccgtgtgcatacacaatatgcgggtcatccgattgcctttgacgatcgctacggtgaccgtgaatttgacaggcagctcactgaagcaggcacgggattaaatcgcctgttcctgcacgctgcagcgttgaagtttactcatccggggaccggtgaggtgatgcgtatcgaagctccgatggatgaaggtttgaagcgttgtttgcaaaagctgcgtaacgcgcgctaatacaagcatataaacctgataatgggcggttggcctgataaggcgtttacgccgcatcaggccgccagcaccgattgccggatgcgacgtaaccacatccggcgcaaaaaactatcccatcagcgggtttttcccttcccgacgtaacatctgacacagcgcgattagcggtaaaccaaccagcgtgttaggatcacgcccctctaaacgctcaaacagcgtaatgccaaatccttcactcttaaagctacccgcgcagtgcaggggatgctctttacgcacgtaattatcaatctccgcctcgctcaggtgacggaaatggacgtcaaaaggctccacttctgtttgcagatgcccattcgccgaattaaacaacgccagtccagtatagaaggtgacgatattgccgctggctttgcgtaattgcagacgggcattttcttccgttaacggtttaccggtgatttcgccatcaagaacacatacctggtctgaaccaataattaaatgatccggataacgtgacgccagagattgcgctttttcttgtgccagtcgaagcaccaactgtcgcggtgattcgtcgctgcgtggggtttcgtcgacctctggtgctgcacattcaaaagagatttgcagtttttccagaagagcgcgacgccatggcgaggtggaggctaaaataagtttaggcatatttttttccatcagatatagcgtattgatgatagccattttaaactatgcgcttcgttttgcaggttgatgtttgttatcagcactgaacgaaaataaagcagtaacccgcaatgtgtgcgaattattggcaaaaggcaaccacaggctgcctttttctttgactctatgacgttacaaagttaatatgcgcgccctatgcaaaaggtaaaattacccctgactctcgatccggttcgtacggctcaaaaacgccttgattaccagggtatctatacccctgatcaggttgagcgcgtcgccgaatccgtagtcagtgtggacagtgatgtggaatgctccatgtcgttcgctatcgataaccaacgtctcgcagtgttaaacggcgatgcgaaggtgacggtaacgctcgagtgtcagcgttgcgggaagccgtttactcatcaggtctacacaacgtattgttttagtcctgtgcgttcagacgaacaggctgaagcactgccggaagcgtatgaaccgattgaggttaacgaattcggtgaaatcgatctgcttgcaatggttgaagatgaaatcatcctcgccttgccggtagttccggtgcatgattctgaacactgtgaagtgtccgaagcggacatggtctttggtgaactgcctgaagaagcgcaaaagccaaacccatttgccgtattagccagcttaaagcgtaagtaattggtgctccccgttggatcggggataaaccgtaattgaggagtaaggtccatggccgtacaacagaataaaccaacccgttccaaacgtggcatgcgtcgttcccatgacgcgctgaccgcagtcaccagcctgtctgtagacaaaacttctggtgaaaaacacctgcgtcaccacatcactgccgacggttactaccgcggccgcaaggtcatcgctaagtaatcacgcatctgcgtgatgaagcttagtgaggattttccccaggcaactggggaaagaccaaaccgggcggcgacgataccttgacacgtctaaccctggcgttagatgtcatgggaggggattttggcccttccgtgacagtgcctgcagcattgcaggcactgaattctaattcgcaactcactcttcttttagtcggcaattccgacgccatcacgccattacttgctaaagctgactttgaacaacgttcgcgtctgcagattattcctgcgcagtcagttatcgccagtgatgcccggccttcgcaagctatccgcgccagtcgtgggagttcaatgcgcgtggccctggagctggtgaaagaaggtcgagcgcaagcctgtgtcagtgccggtaataccggggcgctgatggggctggcaaaattattactcaagcccctggaggggattgagcgtccggcgctggtgacggtattaccacatcagcaaaagggcaaaacggtggtccttgacttaggggccaacgtcgattgtgacagcacaatgctggtgcaatttgccattatgggctcagttctggctgaagaggtggtggaaattcccaatcctcgcgtggcgttgctcaatattggtgaagaagaagtaaagggtctcgacagtattcgggatgcctcagcggtgcttaaaacaatcccttctatcaattatatcggctatcttgaagccaatgagttgttaactggcaagacagatgtgctggtttgtgacggctttacaggaaatgtcacattaaagacgatggaaggtgttgtcaggatgttcctttctctgctgaaatctcagggtgaagggaaaaaacggtcgtggtggctactgttattaaagcgttggctacaaaagagcctgacgaggcgattcagtcacctcaaccccgaccagtataacggcgcctgtctgttaggattgcgcggcacggtgataaaaagtcatggtgcagccaatcagcgagcttttgcggtcgcgattgaacaggcagtgcaggcggtgcagcgacaagttcctcagcgaattgccgctcgcctggaatctgtatacccagctggttttgagctgctggacggtggcaaaagcggaactctgcggtagcaggacgctgccagcgaactcgcagtttgcaagtgacggtatataaccgaaaagtgactgagcgtacatgtatacgaagattattggtactggcagctatctgcccgaacaagtgcggacaaacgccgatttggaaaaaatggtggacacctctgacgagtggattgtcactcgtaccggtatccgcgaacgccacattgccgcgccaaacgaaaccgtttcaaccatgggctttgaagcggcgacacgcgcaattgagatggcgggcattgagaaagaccagattggcctgatcgttgtggcaacgacttctgctacgcacgctttcccgagcgcagcttgtcagattcaaagcatgttgggcattaaaggttgcccggcatttgacgttgcagcagcctgcgcaggtttcacctatgcattaagcgtagccgatcaatacgtgaaatctggggcggtgaagtatgctctggtcgtcggttccgatgtactggcgcgcacctgcgatccaaccgatcgtgggactattattatttttggcgatggcgcgggcgctgcggtgctggctgcctctgaagagccgggaatcatttccacccatctgcatgccgacggtagttatggtgaattgctgacgctgccaaacgccgaccgcgtgaatccagagaattcaattcatctgacgatggcgggcaacgaagtcttcaaggttgcggtaacggaactggcgcacatcgttgatgagacgctggcggcgaataatcttgaccgttctcaactggactggctggttccgcatcaggctaacctgcgtattatcagtgcaacggcgaaaaaactcggtatgtctatggataatgtcgtggtgacgctggatcgccacggtaatacctctgcggcctctgtcccgtgcgcgctggatgaagctgtacgcgacgggcgcattaagccggggcagttggttctgcttgaagcctttggcggtggattcacctggggctccgcgctggttcgtttctaggataaggattaaaacatgacgcaatttgcatttgtgttccctggacagggttctcaaaccgttggaatgctggctgatatggcggcgagctatccaattgtcgaagaaacgtttgctgaagcttctgcggcgctgggctacgacctgtgggcgctgacccagcaggggccagctgaagaactgaataaaacctggcaaactcagcctgcgctgttgactgcatctgttgcgctgtatcgcgtatggcagcagcagggcggtaaagcaccggcaatgatggccggtcacagcctgggggaatactccgcgctggtttgcgctggtgtgattgatttcgctgatgcggtgcgtctggttgagatgcgcggcaagttcatgcaagaagccgtaccggaaggcacgggcgctatggcggcaatcatcggtctggatgatgcgtctattgcgaaagcgtgtgaagaagctgcagaaggtcaggtcgtttctccggtaaactttaactctccgggacaggtggttattgccggtcataaagaagcggttgagcgtgctggcgctgcctgtaaagcggcgggcgcaaaacgcgcgctgccgttaccagtgagcgtaccgtctcactgtgcgctgatgaaaccagcagccgacaaactggcagtagaattagcgaaaatcacctttaacgcaccaacagttcctgttgtgaataacgttgatgtgaaatgcgaaaccaatggtgatgccatccgtgacgcactggtacgtcagttgtataacccggttcagtggacgaagtctgttgagtacatggcagcgcaaggcgtagaacatctctatgaagtcggcccgggcaaagtgcttactggcctgacgaaacgcattgtcgacaccctgaccgcctcggcgctgaacgaaccttcagcgatggcagcggcgctcgagctttaaaagaggaaaatcatgaattttgaaggaaaaatcgcactggtaaccggtgcaagccgcggaattggccgcgcaattgctgaaacgctcgcagcccgtggcgcgaaagttattggcactgcgaccagtgaaaatggcgctcaggcgatcagtgattatttaggtgccaacggcaaaggtctgatgttgaatgtgaccgacccggcatctatcgaatctgttctggaaaaaattcgcgcagaatttggtgaagtggatatcctggtcaataatgccggtatcactcgtgataacctgttaatgcgaatgaaagatgaagagtggaacgatattatcgaaaccaacctttcatctgttttccgtctgtcaaaagcggtaatgcgcgctatgatgaaaaagcgtcatggtcgtattatcactatcggttctgtggttggtaccatgggaaatggcggtcaggccaactacgctgcggcgaaagcgggcttgatcggcttcagtaaatcactggcgcgcgaagttgcgtcacgcggtattactgtaaacgttgttgctccgggctttattgaaacggacatgacacgtgcgctgagcgatgaccagcgtgcgggtatcctggcgcaggttcctgcgggtcgcctcggcggcgcacaggaaatcgccaacgcggttgcattcctggcatccgacgaagcagcttacatcacgggtgaaactttgcatgtgaacggcgggatgtacatggtctgaccgcgatttgcacaaaatgctcatgttgcgcgcagtctgcgtggttatgagtaataattagtgcaaaatgatttgcgttattggggggtaaggcctcaaaataacgtaaaatcgtggtaagacctgccgggatttagttgcaaatttttcaacattttatacactacgaaaaccatcgcgaaagcgagttttgataggaaatttaagagtatgagcactatcgaagaacgcgttaagaaaattatcggcgaacagctgggcgttaagcaggaagaagttaccaacaatgcttctttcgttgaagacctgggcgcggattctcttgacaccgttgagctggtaatggctctggaagaagagtttgatactgagattccggacgaagaagctgagaaaatcaccaccgttcaggctgccattgattacatcaacggccaccaggcgtaagtgaacatctccaggcggtcgttcgaccgcctgagttttatctttttgtcccactagaatcattttttccctccctggaggacaaacgtgtctaagcgtcgtgtagttgtgaccggactgggcatgttgtctcctgtcggcaataccgtagagtctacctggaaagctctgcttgccggtcagagtggcatcagcctaatcgaccatttcgatactagcgcctatgcaacgaaatttgctggcttagtaaaggattttaactgtgaggacattatctcgcgcaaagaacagcgcaagatggatgccttcattcaatatggaattgtcgctggcgttcaggccatgcaggattctggccttgaaataacggaagagaacgcaacccgcattggtgccgcaattggctccgggattggcggcctcggactgatcgaagaaaaccacacatctctgatgaacggtggtccacgtaagatcagcccattcttcgttccgtcaacgattgtgaacatggtggcaggtcatctgactatcatgtatggcctgcgtggcccgagcatctctatcgcgactgcctgtacttccggcgtgcacaacattggccatgctgcgcgtattatcgcgtatggcgatgctgacgtgatggttgcaggtggcgcagagaaagccagtacgccgctgggcgttggtggttttggcgcggcacgtgcattatctacccgcaatgataacccgcaagcggcgagccgcccgtgggataaagagcgtgatggtttcgtactgggcgatggtgccggtatgctggtacttgaagagtacgaacacgcgaaaaaacgcggtgcgaaaatttacgctgaactcgtcggctttggtatgagcagcgatgcttatcatatgacgtcaccgccagaaaatggcgcaggcgcagctctggcgatggcaaatgctctgcgtgatgcaggcattgaagcgagtcagattggctacgttaacgcgcacggtacttctacgccggctggcgataaagctgaagcgcaggcggtgaaaaccatcttcggtgaagctgcaagccgtgtgttggtaagctccacgaaatctatgaccggtcacctgttaggtgcggcgggtgcagtagaatctatctactccatcctggcgctgcgcgatcaggctgttccgccaaccatcaacctggataacccggatgaaggttgcgatctggatttcgtaccgcacgaagcgcgtcaggttagcggaatggaatacactctgtgtaactccttcggcttcggtggcactaatggttctttgatctttaaaaagatctaagttgtcattttccacccttataaaaggtccgcttgcgggccttttttcttagcttttattccgacttgttccgtagtgaacatgctgccacactaacaattctctgataaggagccggtatgttcttaattaacggtcataagcaggaatcgctggcagtaagcgatcgggcaacgcagtttggtgatggttgttttaccaccgccagagttatcgacggtaaagtcagtttgttatcggcgcatatccagcgactacaggatgcttgtcagcggttgatgatttcctgtgacttctggcctcagcttgaacaagagatgaaaacgctggcagcagaacagcaaaatggtgtgctgaaagtcgtgatcagtcgcggtagtggcgggcgagggtacagcacattgaacagcggaccggcaacgcggattctctccgttacggcttatcctgcacattacgaccgtttgcgtaacgaggggattacgttggcgctaagcccggtgcggctggggcgcaatcctcatcttgcaggtattaaacatctcaatcgtcttgagcaagtattgattcgctctcatcttgagcagacaaacgctgatgaggcgctggtccttgacagcgaagggtgggttacggaatgctgtgcggctaatttgttctggcggaagggcaacgtagtttatacgccgcgactggatcaggcaggtgttaacggcattatgcgacaattctgtatccgtttgctggcacaatcctcttatcagcttgtcgaagtgcaagcctctctggaagagtcgttgcaggcagatgagatggttatttgtaatgcgttaatgccagtgatgcccgtatgtgcctgtggcgatgtctccttttcgtcagcaacgttatatgaatatttagccccactttgtgagcgcccgaattagtcatgaaaaaagtgttattgataatcttgttattgctggtggtactgggtatcgccgctggtgtgggcgtctggaaggttcgccatcttgccgacagcaaattgcttatcaaagaagagacgatatttaccctgaagccagggaccggacgtctggcgctcggtgaacagctttatgccgataagatcatcaatcgtccacgggtttttcaatggctgctgcgtatcgaaccggatctttctcactttaaagccgggacttaccgctttacaccgcagatgaccgtgcgcgagatgctgaaattgctggaaagcggtaaagaagcacagttccctctgcgactggtagaagggatgcgtctgagcgattacctcaagcaattgcgtgaggccccgtatatcaagcatacgctgagcgatgataagtacgccaccgtagcgcaggcacttgaactggaaaacccggagtggattgaaggttggttctggccagacacctggatgtataccgccaataccaccgatgtcgcgttactcaagcgagcgcacaagaaaatggtgaaagcggtcgatagcgcctgggaagggcgtgcggacggtctgccttataaagataaaaaccagttggtgacgatggcatcaattatcgaaaaagaaaccgccgttgccagtgaacgcgataaggttgcctcagtatttatcaaccgtttacgcattggtatgcgcctgcagaccgacccgaccgtgatttacgggatgggagagcgttataatggcaaactttctcgtgcagacctggaaacgccgacagcgtataacacctataccattaccggtctgccgccaggtgcgatagcgacgccgggggcggattcgctgaaggctgctgcgcatccggcaaaaacgccgtatctctattttgtggccgatggtaaaggtggtcacacgtttaataccaatcttgccagtcataacaagtctgtgcaggattatctgaaagtgcttaaggaaaaaaatgcgcagtaagtatatcgtcattgaggggctggaaggcgcaggcaaaactaccgcgcgtaatgtggtggttgagacgctcgagcaactgggtatccgcgacatggttttcactcgggaacctggcggtacgcaacttgccgaaaagttaagaagcctggtgctggatatcaaatcggtaggcgatgaagtcattaccgataaagccgaagttctgatgttttatgccgcgcgcgttcaactggtagaaacggtcatcaaaccagctctggctaacggcacctgggtgattggcgatcgccacgatctctccactcaggcgtatcagggcggcggacgtggtattgaccaacatatgctggcaacactgcgtgatgctgttctcggggattttcgccccgacttaacgctctatctcgatgttaccccggaagttggcttaaaacgcgcgcgtgcgcgcggcgagctggatcgtattgagcaagaatctttcgatttctttaatcgcacccgcgcccgctatctggaactggcagcacaagataaaagcattcataccattgatgccacccagccgctggaggccgtgatggatgcaatccgcactaccgtgacccactgggtgaaggagttggacgcatgagatggtatccatggttacgacctgatttcgaaaaactggtagccagctatcaggccggaagaggtcaccatgcgctactcattcaggcgttaccgggcatgggcgatgatgctttaatctacgccctgagccgttatttactctgccaacaaccgcagggccacaaaagttgcggtcactgtcgtggatgtcagttgatgcaggctggcacgcatcccgattactacaccctggctcccgaaaaaggaaaaaatacgctgggcgttgatgcggtacgtgaggtcaccgaaaagctgaatgagcacgcacgcttaggtggtgcgaaagtcgtttgggtaaccgatgctgccttactaaccgacgccgcggctaacgcattgctgaaaacgcttgaagagccaccagcagaaacttggtttttcctggctacccgcgagcctgaacgtttactggcaacattacgtagtcgttgtcggttacattaccttgcgccgccgccggaacagtacgccgtgacctggctttcacgcgaagtgacaatgtcacaggatgcattacttgccgcattgcgcttaagcgccggttcgcctggcgcggcactggcgttgtttcagggagataactggcaggctcgtgaaacattgtgtcaggcgttggcatatagcgtgccatcgggcgactggtattcgctgctagcggcccttaatcatgaacaagctccggcgcgtttacactggctggcaacgttgctgatggatgcgctaaaacgccatcatggtgctgcgcaggtgaccaatgttgatgtgccgggcctggtcgccgaactggcaaaccatctttctccctcgcgcctgcaggctatactgggggatgtttgccacattcgtgaacagttaatgtctgttacaggcatcaaccgcgagcttctcatcaccgatcttttactgcgtattgagcattacctgcaaccgggcgttgtgctaccggttcctcatctttaagagagacatcatgtttttagtcgactcacactgccatctcgatggtctggattatgaatctttgcataaggacgtggatgacgttctggcgaaagccgccgcacgcgatgtgaaattttgtctggcagtcgccacaacattaccgggttatttacatatgcgggatctggtaggcgaacgtgacaacgtcgtattttcttgtggcgtgcatccactcaaccagaatgatccctacgatgtagaagatttacgccgtctggcggcagaagagggtgttgtagcgctgggtgaaaccgggctggattattattacacgccggaaactaaagtacgtcagcaagagtccttcatccatcatatccagattggtcgtgaactgaacaagccggttatcgtccatacccgtgacgcccgtgccgatacgctggcaattctgcgcgaagaaaaagtgacggattgcggtggcgtactacactgttttacagaggacagagaaacggcgggtaaattactggatctcggattttacatctccttttccggcattgtgaccttccgtaatgcggagcaactgcgcgatgctgcgcgttatgtccccctggatcggttactggtggaaactgactcaccttaccttgcgccggtaccgcatcgaggaaaagagaatcaacctgcgatggttcgtgacgttgcagaatacatggctgtgttgaaaggtgttgccgttgaagaactggcgcaggtaaccaccgataacttcgcccgtctgtttcacatcgacgcttcccgccttcaatccatccgttgaatgagtttttttaaagctcgtaattaatggctaaaacgagtaaagttcaccgccgaaaattgggcggtgaataaccacgtttgaaatattgtgacatatgttttgtcaaaatgtgcaacttctccaatgatctgaagttgaaacgtgatagccgtcaaacaaattggcactgaattattttactctgtgtaataaataaagggcgcttagatgccctgtacacggcgaggctctccccccttgccacgcgtgagaacgtaaaaaaagcacccatactcaggagcactctcaattatgtttaagaatgcatttgctaacctgcaaaaggtcggtaaatcgctgatgctgccggtatccgtactgcctatcgcaggtattctgctgggcgtcggttccgcgaatttcagctggctgcccgccgttgtatcgcatgttatggcagaagcaggcggttccgtctttgcaaacatgccactgatttttgcgatcggtgtcgccctcggctttaccaataacgatggcgtatccgcgctggccgcagttgttgcctatggcatcatggttaaaaccatggccgtggttgcgccactggtactgcatttacctgctgaagaaatcgcctctaaacacctggcggatactggcgtactcggagggattatctccggtgcgatcgcagcgtacatgtttaaccgtttctaccgtattaagctgcctgagtatcttggcttctttgccggtaaacgctttgtgccgatcatttctggcctggctgccatctttactggcgttgtgctgtccttcatttggccgccgattggttctgcaatccagaccttctctcagtgggctgcttaccagaacccggtagttgcgtttggcatttacggtttcatcgaacgttgcctggtaccgtttggtctgcaccacatctggaacgtacctttccagatgcagattggtgaatacaccaacgcagcaggtcaggttttccacggcgacattccgcgttatatggcgggtgacccgactgcgggtaaactgtctggtggcttcctgttcaaaatgtacggtctgccagctgccgcaattgctatctggcactctgctaaaccagaaaaccgcgcgaaagtgggcggtattatgatctccgcggcgctgacctcgttcctgaccggtatcaccgagccgatcgagttctccttcatgttcgttgcgccgatcctgtacatcatccacgcgattctggcaggcctggcattcccaatctgtattcttctggggatgcgtgacggtacgtcgttctcgcacggtctgatcgacttcatcgttctgtctggtaacagcagcaaactgtggctgttcccgatcgtcggtatcggttatgcgattgtttactacaccatcttccgcgtgctgattaaagcactggatctgaaaacgccgggtcgtgaagacgcgactgaagatgcaaaagcgacaggtaccagcgaaatggcaccggctctggttgctgcatttggtggtaaagaaaacattactaacctcgacgcatgtattacccgtctgcgcgtcagcgttgctgatgtgtctaaagtggatcaggccggcctgaagaaactgggcgcagcgggcgtagtggttgctggttctggtgttcaggcgattttcggtactaaatccgataacctgaaaaccgagatggatgagtacatccgtaaccactaatccgtaagacgttggggagactaaggcagccagatggctgccttttttacaggtgttattcagaattgatacgtgccggtaatgctgaaattacgcggtgtgccgtagacgatagaaccttccacgttggtatcgtaggttttgtcgaacaggttattgacgttcccctgtaacgagaagtttttcgtcacctggtagcgggtgaagagatccaccagcgcgtagctaccttgctcggcgcggaaggtgccatacggcgtcacggtgtcggtatacacgcgattttgccagttaacaccaccgccgaccgtcaactctggcatgacaggcaaccgatagctggtgaacattttaaccgtggtgcgtggcagattaggattaacggcgtttccttcgttatcctctgcaatatagcgcgttgcgccaaatgtcagctgccagttgtcggtaattgcgccgttgagttcaaattccacccctttactgactgtcccatccaccgctttataggcggtttcgccgttgctgccggggataggtgtaccggtggactgagcgacattatcctgctcaatacggaagatggctaacgtggtggtcagacggctattcatccagtccgatttcagacccagctcgtagttgttaccggtgattggagccagatatttgcctgaactgtcacgatcattttgcggctggaaaatagaggtatagctggcgtaggtcgaccagttgtcattgatgtcaaacaccagaccagcgtaaggcgtggtgtggtttttctccatgctgtaagtcagcgtatcaacccgccagttggtataacgtgcgccgaggatcagatgcagcggatcggcaagggtgacacgagtggcagcatataacgatttcatatgtgtggtatcgtcctgcgccaggctctgtggtgaccagtcggtttgtgggaaattgccattaaagttgtagaaactgccaatttcatccgggaagatgttggcccatgaactgaagtaacgattgttttgtttgctgtaactgccaccaaacattagattgtgctgacgaccaaacaattcataactaccgtcagcgaacaaatccagcgcatcaactttacgtttgccactgttccaaccggtgccgccgacataatcaaagccaggtccataattactgtatggcccaaccagcataccatccgctttgtttacataggcatcgacatacatcattttgctgtcaaattcgacttcagagtgggtggcattcagtgtcgcttgccaggtatcagcaaactgctgcttcagggtcataaagaccttgttgatctctttatcgttgtacgcccagtcaggtgcggtactgcgtgcgcgatcgtaactgttgctgctgccatcagtattccagcgcggtaaaccgccccaggtagggctattaacatcaatgcgctgatattcgtaaccggctgaaagcgtcgtaagatcgcctaaatcagcatcgacaatgcccgagaagaaggtcttttcactgttgtagcggtccagccatgagtcgttattctggtagccgccgacaattcgcgcgcggattttaccgtcttcggtgagtgggctttgtaaatccgccacataccgttctttgttccagctaccgtattccgccgagacatcgcctttaaattcacgactggtcgcgtgttttcgaaccatattaattgccgcagatggattacccgtcccggtcatgagtcctgtcgcgccacgcactacttctacgcgttcaaagagtgccatatcagaaagtgcgtcgcccagattccagcgcgattcaaaataggtggggataccatcaaccatatagttatcgatctggaatccgcgggaataataaagagcacgatcggaatccgcctgacttttgctgatccccagcgtgttttccatcacttcgcccagcgtttgtaactgctgatcttccatccgctgctggctaacaatagtgaccgactgaggaatatcacgttgagtcatctgcattttggtacccgcagaggtagacgttacgctgtaatcattttcgccatcatctggagctgtggctgaaccctcaacaatcaccgtttcttcagtggctggtgcagcaaaagcggcagaaggtaatagtgccagtgctatgcaaccggcaagtagtgacggtttggtgatggcttgatattgattatccctgttaaattgtgttgaaagcatttgaaatctcttggtttatgttgtcgtcaggctcatgccggaggagggtgatgagcgattatatttagtgtgcgaataattttgtttgtaaatgcaaatgagaaatatacgcattcatatttgtcatgtaaaccaaacagagaatgtcttttcagcgcattcgcaggcagaaatgggaataatggcgatatatacggcagcaaaacgattttttgcttaagaaatcgtgagttaaggttgaaagagcaggtttaactcgaccatactctatactcgcagtgtggcgcggcgtagcatggcgcaacgcatggctatttgaaaaaggaaaatgtcgtggcagaagaaactatattcagcaaaattattcgtcgtgagatcccctccgatatcgtctaccaggatgatctggtaacggcgtttcgcgatatttcgccgcaagcgccaacgcatattctgatcattccgaatatcctcattccgactgtgaacgacgtctcagctgagcatgagcaggcgctgggacgcatgatcaccgtagcggcaaaaattgctgagcaagaaggtattgccgaagatggctatcgtctgatcatgaataccaaccgccatggcggacaagaggtttaccacatccatatgcacttgttgggtggccgtccgctgggaccaatgctggcgcataaaggtctgtaacgatgagaaaaggatgctttgggctggtgtctctggtgttgttactgctggtgggctgtcgttcacatccggaaattccggtgaatgatgagcaatcgctggtgatggagtcatctttattggctgcgggcatcagtgcagaaaagcccttcctttcgacgtctgatattcaaccttcagcatcctcaacgctttataacgaaaggcaagaacccgttaccgttcattatcgtttttactggtatgacgccagagggctggagatgcatcctctggaaaggccacgcagcgttaccattcccgcacattcggcggtaacgctgtacggcagcgccaattttctgggggcgcacaaagtcagactttatctatatttgtaaggggtgaatcttgatgacaaaaatgagtcgctacgccttgattaccgcgctggcgatgtttctcgccgggtgtgtggggcaacgtgaacctgcaccggtagaagaagtgaaaccagcgccggaacaaccagccgagccacaacagcctgtccccacagtgccctcggtgccgacgatcccgcagcagccaggcccaattgagcacgaagatcaaactgcaccgcctgcgccgcatattcgccattatgactggaatggcgcaatgcagccgatggtcagtaagatgcttggggctgacggggtgactgcgggtagcgtcctgctggttgatagcgttaacaaccgtactaacggttcgctgaatgccgcagaagcgaccgaaacgctgcgaaatgcgctggctaataacgggaaatttaccctggtttccgcccagcaactgtcgatggcgaagcaacagttaggtttgtcgccgcaggacagtttaggcacccgtagtaaagccataggcattgcccgcaatgtcggcgctcattacgtgctgtactccagcgcctctggcaacgttaacgctccgaccctacaaatgcagctgatgctggtgcagacgggcgaaattatctggtcaggtaaaggtgccgtttcgcagcaataatcccatcacgcgcgacgaattgctgtcgcgctttttcccgcagtatcatcccgtcacgacgtttaatagtgggcttagtggcgggagttttctcattgaacatcagggccagcgttttgttgtgcgtcagccgcacgatcctgatgcgccgcagtccgcgttcttgcgccagtatcgggctttatcacaactacccgcatgcattgcaccgaagccgcatttatatctccgtgactggatggtagtcgactatctgcccggcgcggtaaaaacgtatttgccggataccaacgaactggcaggcttgctgtattatctacatcaacaaccacgttttggctggcgaataacgctgttgccgttactggaactgtactggcagcaaagcgatccggcgcggcggacagtgggttggctgcgaatgttaaaacgtctgcgcaaagcgcgggaaccacggcctttacgcttaagtccattgcatatggatgtccacgccggaaatttagtgcatagcgcgtcagggttaaaactcatcgactgggagtatgccggagatggtgatatcgcgctggaactggcggcggtgtgggtggaaaatactgaacagcaccggcaattggtcaatgactatgccactcgcgcgaagatttatccggcgcaattatggcgtcaggtcaggcgatggtttccctggctgctgatgctcaaagcagggtggtttgagtaccgctggcgacaaaccggcgatcaacaatttatcaggctggccgatgacacctggcggcagctattaataaaacaataaggagagcagtgtgggtccagtaatgttggatgtcgaaggttacgaactggacgcggaagagcgtgaaatactggcgcatccgctggtgggagggctgattctctttacgcgtaactatcatgatcctgcccagttacgtgaactggtgcgccagatccgcgcagcttcgcgcaatcgtctggtggtggcggttgatcaggaaggtggacgcgtgcagcgttttcgtgaaggttttacccgcttgccagcggcgcaatcattcgctgcgctgtcaggaatggaagagggtggcaaactggcgcaggaggcaggttggttgatggccagcgaaatgatcgctatggatattgatatcagctttgcgcctgtgctggatgtcgggcatatcagcgcggcgattggcgagcgttcttatcatgccgatccacaaaaagccctggcaattgccagccggtttattgatggtatgcatgaagccggaatgaaaacgaccgggaaacacttcccaggacacggtgcagtaacggcagactcacacaaagaaacaccgtgcgatccacgtccacaagcggagattcgcgctaaagatatgtcggtcttcagttccttaatccgcgaaaataaactcgacgccattatgcctgcgcatgtgatctacagtgatgttgatccgcgtccggcgagcggttctccctactggctgaaaaccgttttgcgtcaggaactgggttttgacggcgtgattttctctgacgatttatcgatggaaggtgccgcgattatgggcagttatgccgaacgcgggcaggcttcactggatgcgggttgcgatatgatcctggtctgcaataatcgtaaaggggccgtcagcgtgttagataatctgtcaccgatcaaggcagaacgtgttacacgtttgtatcataaaggttcattttcgcgacaggaactgatggactcggctcgctggaaagcgatcagcacccgtctgaatcagttacatgaacgctggcaggaagagaaagcaggtcactaaccctggcttatgtgaggaagcgatgattatctatttacacggttttgactctaacagtccgggtaaccacgagaaagtcttacaattgcagtttattgacccggatgtacgcttgataagctacagtacgcggcatccgaaacatgatatgcagcatctgcttaaagaagtggacaaaatgttgcaactgaacgttgacgagcgtccgctaatttgcggcgttggcttgggcggatactgggcggaacggattggttttctttgcgacatccgccaggtgatcttcaaccctaatttgttcccttatgagaacatggaaggcaagattgatcgcccggaagagtatgccgatattgccactaagtgtgtgaccaacttccgtgagaagaatcgcgatcgttgcctggtgattttgtcgcgtaatgatgaagcgcttaacagccagcggacatctgaagagttgcatcattattacgagattgtctgggacgaagagcagacgcacaaattcaagaatatctccccgcatttacagcgcattaaagcgttcaaaaccctcgggtaaatgccctcgtcgcatcaggtaaccttgccggtacctgatgcgctccgaattctgtgggtcggataaggcgtccacgccgcatccgacagtcgagcatcaatgcctgatgcgcttcttatcaggcctaccgaacgccctgcatacacccctcactctatatcactctcacaaattcgctcaaataataaacaataaactctgttttttgatctcacccggtaaagtcgcctatcttttcagcaacaaaacttgattaacatcaattttggtatgaccaatgcaccattcatgttattctcaatagcgaagaacattttcattgctgtaacctgttgttaattaagagctatgttaataaccattaattaacaattggttaataaatttaagggggtcacgttgactacgccattgaaaaagattgtgattgtcggcggcggtgctggtgggctggaaatggcaacacagctggggcataagctgggacgcaagaaaaaagccaaaattacgctggtcgatcgtaaccacagccacctgtggaaaccgctgctgcacgaagtggcgactggctcgcttgatgaaggcgtcgatgcgttgagctatctggcccatgcgcgcaatcatggtttccagttccagctgggttccgtcattgatattgatcgtgaagcgaaaacaatcactattgcagaactgcgcgacgagaaaggtgaactgctggttccggaacgtaaaatcgcctatgacaccctggtaatggcgctgggtagcacctctaacgatttcaatacgccaggtgtcaaagagaactgcattttcctcgataacccgcaccaggcgcgtcgcttccaccaggagatgctgaatttgttcctgaaatactccgccaacctgggcgcgaatggcaaagtgaacattgcgattgtcggcggcggcgcgacgggtgtagaactctccgctgaattgcacaacgcggtcaagcaactgcacagctacggttacaaaggcctgaccaacgaagccctgaacgtaacgctggtagaagcgggagaacgtattttgcctgcgttaccgccacgtatctctgctgcggcccacaacgagctaacgaaacttggcgttcgcgtgctgacgcaaaccatggtcaccagtgctgatgaaggcggcctgcacactaaagatggcgaatatattgaggctgatctgatggtatgggcagccgggatcaaagcgccagacttcctgaaagatatcggtggtcttgaaactaaccgtatcaaccagctggtggtggaaccgacgctgcaaaccacccgcgatccagacatttacgctattggcgactgcgcgtcatgcccgcgtccggaagggggctttgttccgccgcgtgctcaggctgcacaccagatggcgacttgcgcaatgaacaacattctggcgcagatgaacggtaagccgctgaaaaattatcagtataaagatcatggttcgctggtatcgctgtcgaacttctccaccgtcggtagcctgatgggtaacctgacgcgcggctcaatgatgattgaaggacgaattgcgcgctttgtatatatctcgctataccgaatgcatcagattgcgctgcatggttactttaaaaccggattaatgatgctggtggggagtattaaccgcgttatccgtccgcgtttgaagttgcattaatcgacgtacactggcggatgtggcataaacgcctcatccgcccttgaggaacagcgcgatcggcagccgcgttgtatcaggcatcctttcagactcctccgaatccttaagtatttccagccattcccgcgcttttcatcttctgtctgatagctgcttttctccttcgcttgcatgattggcataactgcaaagaaggaggtgttcccgtgaataaatcaatgttggcgggtatcgggattggtgtcgcagctgcgctgggcgtagcggcagtggccagtctgaacgtgtttgaacggggcccgcaatacgctcaggttgtttctgcaaccccaatcaaggaaacggttaaaacaccgcgtcaggagtgtcgcaacgtcacagtgacccatcgtcgaccggtgcaggatgaaaatcgcattaccgggtcggtgctcggcgctgttgctggcggcgtgatagggcatcagtttggtggtggtcgcggtaaagatgtcgccactgttgtgggggcgctgggtggtggatatgccggtaaccagatccagggctctctccaggaaagcgatacttacacgactacgcaacagcgttgtaaaacggtgtatgacaagtcagaaaaaatgctcggttatgatgtgacctataagattggcgatcagcagggcaaaatccgcatggaccgcgatccgggtacgcagatcccgctagatagcaacgggcaactgattttgaataacaaagtataacaaggctgtactctgcaatttggcccctcattcgctcaggctgaggggctttttttgcgacttatttcaccagttcgggccataaacgcaaagtcgttccggcaatctgcatcagtttttccagcgatgcaccttcgcgtgcgctgatcgacatcccctgaataatacaattaaggaattctgccagatgtgtcacgtcacagtggggcgggatttccccgcgcgcttgtcgttgacataaaaactgctgcaaagtgcgctcttgcatcgcatggcgtgatttcaacgtattggcgatatctcctgaatctggggagagggtggtgcagttgttgatcatgaagcagcctgccggggtgtctttgctggtaaagcagttggcgatggcagcaaaatagtcagccagcgcagactccacgcttttctcttcacaaaacagctgtgcttcatgcttagcggcaaaacgatcgatatagcggtcgagaacggcacgaaataacccctctttgttggtaaattccgcgtatagcgtgggcgctttggctccggtcgcttcgacgaggtccgcaagagaagtcgcttcataaccgtgttgccagaacaatttcatggccttatcaagcgcggcatccctgtcgaacacttttgggcggccacggcttttttttacacattgtgttgagtcagttgccatgatgccgttgtacctggtgactgtgaatgaaaggttattataaaaataatcacctccgttcaccagtccagatcccataaaaataattgctttctatttaactgaaatttaaagatttttaaattaattaatgattgttataaaaaatatcttgtatgtgatccagatcacatctatcatttagttatcgatcgttaagtaattgcttgcgacgtcattcatctgcataaggccactattatgaaaaacgtaaaaaccctcatcgctgcggcgattttaagctccatgtcatttgccagctttgcggctgtcgaagttcagtcaacgccagaaggccaacaaaaagtcggtacaatcagtgctaacgcggggacaaatctgggatcgctggaagagcagctggcgcaaaaagcggatgagatgggcgcaaaatctttccgtattacttctgtaaccggtccgaataccctccatggaacagcagtaatttataaataagcattaaccctcattaatgcctgctactgctgattttttccccgcgacatgccgtgtcgcggggatttttttatccgggctttacagcgtttgtgggctcacttgatgacggcggacatccaccggcatcccggaacggacatccatcacatgttgcatcacttcagcgtcagtttgtgctgcatctttaaatgattgcattgcgctattcagcgtaattggcagcagctgcggatcgtcatcaatcttctctgacagcggctgatgtacttcaaccagacgcgcaccgtttggttcggcagagacttttatcggagtgttgatgatattcactttggtgcctggggtgacctggctaaagagtgttttgatatcgtcatcccgcagacgaatacagccagaacttacccgcatgccaatgccgaaatcggcgttcgtaccatgaagcaaataaacgccgccataggccgccagacgaatcgcatgatggcccattgggttatccagtccagccggcactaccgcaggcaactcaattccctgtgctttataacgggcgcggatgtttgccgttggcgtccaggttgggtttgcacgtttgtctgaaacggtggtcaccattgtcggtgtcagcgtgtcaccacctaactgaccaatacctattggatacacggttaccgaatttttacccggcgggtagtaatagagacgcagctccgcaatgttgatcacaatgccttcgcgcggcgcatctggaagtagggtttgcaacgggatcgttaacacgctgcccgcgcgcggtacgtaaggatcaacgccggggttagcctgtaacagagcgagaaagccgacgttgtattttttggcgatggcttccagagaaccaccgtcattttccaccacatgaaatttgttttcgccaaccagacgactgcccgctggcggcagcggccaggtgttggcttttgccggtagcgccagcgccacggcagcggcgaacgtaaaaaacgttagccagcgagaaaaacgcgttttgatcatcaccaaaaatccataataaatataaggttattgtaataaacagataagcctgaattatggatggtgacagtgtcggatagtgcagggaagtgcaaagaatttgtaaatgttgcagatgggggcgcagaaacgcccccgatttaccattaagcgatcgcgttctcttccagttcacgcataaactggcgtacccattcgatacgcgttttccgctcactcaaatcctgaataaatttcaggcgcgtcggaccatcaaggcggtaatgctgcggctgtttttgcagcaaaccaatcaaccaggccggattaacgtgattcttctcggcaaattcgatcaccccgcctttctcattaccttccagcttcctgatccccagtttctgcgcttgctggcgcagacgggcaatatccagcagggtacgcgccggatctggcagcaggccgaagcgatcgataagctcgactttgatctcttccagttcgttttccgttttggcgctggcaatacgtttgtagaacgacagacgcgtgttcacgtcagggatgaaatcatctggcaatagcgacggcatccgcagctcgacttctgtttgctggctggtgagatcttccagcgacggctcgcgtccggctttcagtgcatcgacggcgttttccagcaactccatatacagcgagaaaccgatggtttccattgagccgctttgttcttcgccaagcagttcacccgcgccgcgaatctccagatcgtgcgttgccagcgcaaaacctgccccgagatcttccagcgaggcaattgcttcaagacgtttttgtgcatcggtagtcatcgcttttggatgcggtgtcagcaaccatgcatatgcctgatgatgcgaacgtccgacgcgaccgcgtaactggtgcagctgcgccagaccgaagtgatccgcgcgttcaatgataatagtgttggctgtcgggatgtcgatcccggtttcgataatggttgtacaaaccagcacgttgaaacgttgatgatggaaatcattcatcacccgttccagttcgcgctcgcgcatctgcccgtgaccgatggcgatccgcgcttctggcaccagttctgccagccgttcggcggctttctgaatgttttccacatcattgtagagataataaacctgtcctccgcgcaaaatttcacgcaggatcgcctcccggaccaccatgctgtcatactcacggacaaaggttttaactgccagacgacgggcgggcggcgtggcgataatcgacaggtcacgcattccgctcattgccatattcagcgtacgtgggatcggcgttgcagtaagcgtcagaatatccacgttcgcgcgcatcgctttaatgcgctctttatgacgcaccccgaagcggtgttcttcatcgacaatcagcaggcctaaatctttaaacttgacgtcactttgcagcagtttgtgcgtaccgatcagaatatcgattttcccttccgccacttccgcaaggatttgcgtctgctctttggcgctgcggaaacgggagatcatttcgatacgtaccggccagttggcgaaacggtcgcggaagttgtcgtaatgctgctgcgcgagaagggtggtaggcaccagcaccgccacctgcttgtggttatctactgccaggaaagctgcgcgcatcgccacttctgttttaccaaagccaacatcgccgcacaccagacgatccattgccagcggctgacacatgtcgctaagtaccgcattaatggcctgcgcctgatccggcgtggtttcaaacgggaagctgtcgcagaacaactgatactgctcacgatcgtgtttaaacgcgaagccctctttggcggcgcgttgcgcgtagatatccagcaattccgccgccacatcacgcactttttccgccgctttctgccgcgcgcgtgaccacgcatcgccgccaagtttatgcagcggggcgttttcttccgcgccacctgcgtaacggctaatcagatgcagtgacgacaccggaacatacagtttggcgtcgttggcataggtgagcatcagatactcgccagtaatgccacccgcttccagcgtggtcattccggcataacgaccgacgccgtgctccagatggaccaccggctgaccaatatgcagttccgcaaggttacggatcagtgtatcggggttgatggtgcggcgagaatcctgacgacgacgggcaacgcgttcaccgagcagatcgctttcgcaaatcagcgccagattacgcaccgtatcgacaaaaccatgttcggcagcgccaatcatcagataacgcccacggtcgctggcttcatcaagacgcataatgcgttgcggagcaattttaattcgtgcgagcagttcacccagcgcttcacggcgaccttcactttctaccgagaacaccaccggaccgtcgaaagtctcgaggaacttacgcagcgcatccagcggcgctttttgttgtgcctgaacggccaggtctggcagtttctggaaacctaaattggcattcgcggcttttgtcggtaaatgttcagtttttagctgcacccggggccagtttttcagctctgagaagagctcgtccacccgcagccagagcgattgtggtggcaacagcgggcgcatcggatcgacgccgcgattctcaaaacgcgccagcgtgtcagcctggaaacgttcggcactggtttccagatcgccagtattcacgagcaaggtattggcagggaaataactgaacagcggcggcagtggttcgctgaagaacaatggctgccagtactcgatcccggcaggtaatgtgcctttactcacttgctggtaaatatgttctggatcgcgcttcacttcgaaggtatcgcgccactggctgcggaacagttcaattgccgctttatcggtcggaaattcgtgcgcgggcagcagattgatcgcttctacttcctccagcgtgcgctggctgtcgacgtcaaacacccgcaggctgtcgatttcatcatcaaagaaatcaagacgataaggcagctcactccccatcgggaagagatccagcaacgcgccgcgcgtggcgtattcgccgtgctccatcacctggtcaacatggcgataaccggcgctgtccagttgggttcgtaatgcatctcgtgacaggcgctgaccttttttcatcaccagcgcatgaccgtggagaaaactgtgtgggcaaacgcgctgcataagcgtattcaccggaacaatcagtacgccacgctgcatcgtcggtagctggtaaagggtggaaaggcgcgaggagataatgtcctgatgaggcgaaaaactgtcgtagggaagagtttcccagtccgccagattcatcaccatttgatcggtaaactggctgatttcatcatgcaaacgcagagcattttgcatatctggtgcaatgagtaccaccggaccggcgtgacgttcggcaatttccgctaccagcgttgcacaggctgcgccggttaactcgcccagcagacgctgctcacccgctttgacgggcagcgtataacgatattgttcaggcataacggttgtcagattctcgttaggatatgcctcaacatatgggggcatatctctgataagcaatgctgttcattatccgtaatcgacatggtttagcaaattgaatcgccccggctggggcgatggcttagcgggagtaactgacggcagcgggcagtgaaggcggggagaacaacagatcgctgaatgcacgctgtgaaagttttcttaccagcaagcccgcaacagtacagatgaacaaactgacaaagggataaaccagcaggagtgtcagttcgacttgcggcgaccagcgtgctgcgttcatttgcgcaagcagagttaagctgaatatttcaaccagaatgcgatgggtggtgtagatagcaatggtgttggagccaatcacattcagcaggctggtggagcgcataccgaatcgttgctcgtattgataaaacagcttcatgatcaccacaatcgataccagcgacaacagcagcgagatagtaaacaaccaggcaccgaccgccagaacggtaagcaaagaagccatcagcagatggcggcgcaacggcacctctttaacacaggtcattattgttgcgccaaaccatgcgccaaggctgtaataaggcaaattgcggatcacactgttcattccccaccacggcgtgggaacgaaattaaccgccacactcagcagtacaaacaaggcgaatagtggcagcgccagacggctaaaaattttacataccacgaaatagacaattaacgcatacagataccacaagctggtgctggcggtgatcatcccgtgcaggaactcaccggtggaatcggcataagcggcattggaggcattgcttaaatcgcgctcaggtgccagccactggttcagcgcacttaacgccagccactgcaccacgccccaaagcgccagcacccagaagatgttccagatccgtttatcgagacaatttccccacggtacgctgtcgatatagcggcgaatcaaatagccggatataaagaaaaaaaccggcatacgaaagggggcaaggtaaagattgaaatagatccagcatttgctcaggacttccgataacggatgctgaaaagtggtcagatgcggataaaaggtaatgaccgagtgataaatcaccaccagacaaatacataaccctttgatctggttaatccatagctctttttgtttcatcaggacaacacgctcttttttaatttacatgcggttgatcctgcgggttatgacccgaggtgtaatgggtatctgtctgtattggatgatttttcagattaagatcaggcggcaagattgatgataaaacatggcaatttagccgattgatttacgggggcttttcagattagccctgacgatcacttacagttcagacgtttacccatcttgctttcgcttatatactcgtgtctttgctacagcaaccagacggatttcatgtaccaacctgtcgctctatttattggcctgcgttacatgcgtgggcgtgcagcggatcgcttcggtcgtttcgtctcctggctttctaccatcggcattaccctcggggtgatggcgctggtcacagtattgtcagtgatgaacggctttgagcgcgagctgcaaaacaacatccttggcctgatgccacaggcaattctctcttctgagcatggctctcttaacccgcagcaactcccagaaacggcagtcaaactggacggcgttaatcgcgtcgcacctattactaccggtgatgtggtactgcaaagcgcgcgcagcgtggcggtcggggtgatgctcggtatcgacccggcgcaaaaagatccacttacaccgtatctggtcaatgtgaaacaaactgacctcgagccggggaaatataatgtcatcctcggcgaacaacttgcctcacagctaggcgttaatcgcggtgatcaaatccgcgtgatggtaccatctgccagccagttcacgccgatggggcgtattccaagccagcgcctgttcaatgtgattggcactttcgccgccaacagtgaagtcgatggctatgaaatgctggtgaatattgaggatgcctcgcgtctgatgcgttatccggcaggcaatattaccggctggcgtttgtggctggatgagccgctgaaagtcgactcattaagtcagcaaaaactgcctgaaggcagcaaatggcaggactggcgtgatcgtaaaggcgagttgttccaggccgtacgcatggaaaaaaatatgatgggtttactgctgagcctgattgtcgccgttgcggcgtttaacattattacctcactagggctgatggtaatggagaagcagggcgaagtagcgatcctgcaaacgcaaggcttaactccgcgacaaatcatgatggtctttatggtgcaaggggccagcgccgggattatcggtgcgatcctcggagcggcgcttggcgccctgcttgccagccagttaaataatctgatgccgataatcggcgtcctgcttgatggcgcggcgctgccggtggctatcgaacctttacaggtcattgttattgcgctggtggcgatggctatcgcgctgctgtctacgctttacccttcatggcgcgctgccgccactcaacccgctgaggctttacgttatgaataagatcctgttgcaatgcgacaacctgtgcaaacgctatcaggaaggcagtgtgcaaaccgatgtgctgcacaatgtcagtttcagcgtcggcgaaggtgaaatgatggcgatcgtcggtagctctggttccggtaaaagtaccttgctgcacctgctgggcgggctggatacgccaacctccggcgatgtgatttttaatggtcagccaatgagcaaactgtcgtcggcagcgaaagctgaactgcgcaaccagaagctgggctttatttatcagtttcaccacctgctgccggattttaccgccctggaaaacgtggctatgccgctgctgattggcaagaaaaagcccgctgaaatcaacagccgtgcacttgagatgttaaaagcggtggggctggatcatcgtgcgaatcaccgcccatctgaactttctggcggcgaacgccagcgtgtggcgattgcccgtgcgctggtgaataacccgcgcctggtactggcggatgaacctaccggtaacctcgatgcgcgtaacgccgacagcatcttccagttgcttggggaattgaatcgcttgcagggcaccgccttcctggtggttactcacgacctgcaactggcgaaacgtatgagccgccagttagaaatgcgtgatggtcgtctgacggcggaactgagcctgatgggggcggagtaatggcgatgcctttatcgttattaattggcctgcgttttagtcgcggacggcggcgcggcggcatggtgtcgctgatctccgttatttctaccattggcattgccctcggcgtggcggtattgatcgtcggcttaagcgcgatgaacggctttgaacgcgaactgaacaaccgtattctggcggtggtgccgcatggtgaaatcgaggcggtggatcagccgtggactaactggcaggaagcactggatcacgtgcaaaaagtgccgggtattgccgctgccgcgccgtatatcaatttcaccgggctggtggaaagtggcgcgaatcttcgcgcaatccaggtgaagggcgttaacccgcaacaggaacagcgtctgagcgcattaccctcgtttgtccagggcgatgcgtggcgcaattttaaagcgggcgaacagcaaattatcatcggcaaaggcgtggcggatgcgctgaaagtgaagcagggggattgggtgtcgattatgatccccaactcgaatcccgagcataaactgatgcagccaaaacgtgtgcgtttgcacgttgccggtattttgcagttgagtggtcaactcgatcacagttttgccatgatcccgctggcggatgcccaacaatatcttgatatgggttccagcgtgtcaggtattgcccttaaaatgacggatgttttcaacgccaataagctggtacgcgatgcgggtgaagtgaccaacagctatgtttatattaaaagctggattggtacttacggctatatgtatcgcgatatccaaatgatccgcgccattatgtatctggcgatggtactggtgattggcgtggcctgtttcaacatcgtctccaccttagtgatggcggtgaaagacaagagtggcgatatcgcagtattaagaacgctgggggcgaaagatggtttaattcgcgccatctttgtctggtatggattgctggcagggctgttcggcagcctgtgtggtgtgattatcggcgtagtggtttcactgcaacttaccccgattattgagtggattgaaaagttgatcggtcatcagttcctctccagcgatatctattttattgatttcctgccatcggaattgcactggctggacgtcttctacgtactggtcacagcattgttgctgagtcttttggcaagttggtatccggcgcggcgcgccagtaatattgaccctgcgcgagtccttagcggccagtaaaggcagtacattaaaacaaggagcggcaatgtattacgggtttgatattggtggaacaaaaattgcgcttggcgtgtttgatagcggtcggcagttgcagtgggaaaagcgggtgccgacaccgcgtgacagctatgacgcatttttagatgcagtgtgtgagctggtagctgaagctgaccaacgttttggctgtaaaggttctgtcggcatcggtattccgggaatgccggaaacagaagatggtacgctgtatgccgccaatgtccccgctgccagcggtaaaccgctgcgtgccgacctgagcgcacgtcttgatcgcgatgtacgccttgataacgatgccaactgttttgccctttcagaagcctgggatgatgaatttactcaatatccactggtgatggggttgattctcggcaccggtgttggcggcgggctgattttcaacggcaaaccgattaccggtaaaagctacattaccggcgagtttggccatatgcgtctgccggttgatgcgttaaccatgatggggttggatttcccgttacgccgctgcggctgtggtcagcatggctgcattgaaaattatctgtctggtcgcggttttgcgtggctgtatcaacactattatcatcaaccgttgcaggctcccgaaattattgcgctttatgatcaaggcgatgagcaggcaagggcgcacgttgagcgttatctggatttattagcggtttgtctgggaaatatcctgaccatcgttgaccctgacctggtcgtcattggtggtggcttatcgaatttcccggcaatcacaacgcaactggcggacaggctgcctcgtcatctcttacctgtagctcgtgttccgcgcattgaacgcgcgcgccacggtgatgcgggaggaatgcgtggtgcggccttcctacatctaaccgattaaacaacagaggttgctatgctgtcgcgtcggggtcatcggttaagtcgttttcgtaaaaataaacgccgcctgcgcgagcgtttgcgtcagcgtatttttttcagagataaagtggtgccggaagcaatggaaaaaccaagagtactcgtactgacaggggcaggaatttctgcggaatcaggtattcgtacctttcgcgccgcagatggcctgtgggaagaacatcgggttgaagatgtggcaacgccggaaggtttcgatcgcgatcctgaactggtgcaagcgttttataacgcccgtcgtcgacagctgcagcagccagaaattcagcctaacgccgcgcatcttgcgctggctaaactgcaagacgccctcggcgatcgctttttgctggtgacgcagaatatcgacaacctgcatgaacgcgcaggtaataccaatgtgattcatatgcatggggaactgctgaaagtgcgttgttcacaaagtggtcaggttctcgactggacaggagacgttaccccagaagataaatgccattgttgccagtttccggcacccttgcgcccgcacgtagtgtggtttggcgaaatgccactcggcatggatgaaatttatatggcgttgtcgatggccgatattttcattgccattggcacatccgggcatgtttatccggcggctgggtttgttcacgaagcgaaactgcatggcgcgcacaccgtggaactgaatcttgaaccgagtcaggttggtaatgaatttgccgagaaatattacggcccggcaagccaggtggtgcctgagtttgttgaaaagttgctgaagggattaaaagcgggaagcattgcctgatgcactacgcttatcaggcctgcaaggggacgcaattaattgaatttgcgggttttgtgggccggataaggcgttcgcgccccatccggaataatacacgcgcacttttccggcctcttttatcgtttactcgtcaataacaatgcggcaataaacgtacagacaccaattagccctgcccagagtggcgatattctggtaatcgcaaagctattatcgatatacaaacataaagcctgataacccatattggcaatagtcatcgccactgcaaattttaacgcataaataaaacgagtcgtgtagtaaaagatcctggaaaataagataaacgtcgcagcccaggcgataaaacctaatgtgttggtgctgccggggggagcattttcatgctgttgtcctggatgcggataatacgttagtggcggcgtcgattgttttaatatctgtgcttgtagaacagccaatgcattattgattccctgataccagagatctgcatttaaataagccagcgtgtgattttctatcagaaggccgagatgtttatcgtccagaccactttcaacctggccgttggtgatcataattaaccgtggttcgcgggtagtaaatagtaacagaacacttccttttacatcactcaatgaagatgacgcatgcgccagcatcgctttaccattttgtctgagactggcttcattattaatgtcgggtaaaaccacaataaacggtgcaattcccgtttgttggcgaaaaagctcggctttatgcgcgatctcttcagcatctggtacagtaccggtaacgtccgtaaaaagtgtcttcattattggaattaatggcttgctggctgctgtcagaggcaggagtatcagtaaactgagcagtataatgaattttttcatgggcgggacttccgtttcctgcgtgattttttagaggagggcatacttattaataaaccgacggcgataaaaataacgcccataatgccgataaacccccatttaaaaaaattaacccacgggttatttatctcagccttttcaggatgcccgggagaataataaacattaactttatcgccttcgctgtcttcataaaaatcgctgccgatactcgaattgaaaattagcgtgtaatctggcgtcggtcgaaaggcaacgacgggataccacgaaccatctttacccgtgcgatgagaatgactggagtgccagacggtatcaacaatgacgccttcggtatgaatcgcgtctttgctataggtgaactggttataaaagacaacaacagaaatgaggatcagtaccagaccgataccgaggaatatacgaaagaaaactttactgtcctgactcattagccacatccttgctaactaaaaaacgggcggtaataccaccgcccgcttgctgaattaacgtcctgctttcagcttctgataatactcttcataaatgctgctggctgcgccaacgtcattctgccattcgccatttttaatggtttcagcatccgggtagagtgttttatcgttcgccacttctggacttaacagcttacgcgccgcaaggtttggcgttggataaccgatagtttcagcaacctgttttgccacatccgggcgcagcaggaagttgatcaatttcagcgcgccttctttgtttttggcatttgccgggatcgccaggctgtccatccagaaaatgccgccttctttcggccacaccacgtcaattggcgtacccgcctggcgtgcaacgaaagcagaaccgttccagatcatgccgaggttaacttcgccttccatgtacgggttcgccgggttatcggagttaaaggctgccacgtttggcatcagttttttcagctcgttatatgcagcttcaatctctttcggatcggtggtgttaccggagtagcccagcttacgcagcgccatctggaacacttcacgggcatcgtcggtcaacagcaggctgcctttgtactctggcttccacagatcggcccagctggtgacagatttcggatccaccgcatcaccgttaacaccaatcgccgtcgcaccccagatatacggaatggagtagtcgttattcgggtcaaaaggcttgttgagcatgtctggatcgagattgctgaagtttgttaacttcgacttgtcgatcttctggatcatcccttctttacgcattttatcaacgtaataggttgaaggaaccaccagatcataggcaccgtctttgtatgttttcagcttggcgtacatggtttcgttcgactcgtaagtcgaatagataaccttaataccggtttctttggtgaactgttcaagcagtcctggcggcacgtactcggtccagttgtagaaatacagcgtgttgttgtcatcggcgtgagcggcgctcatgcccagtgccagagcacccgccgcgagcaggtggcgtgaccattttttcatttaacgtcccctgtgttacctttcgttttatcacgagcaataagctggctggcaataaccatcaccagcgacagcaccagtaatatggttgccagcgcgttaacttccggcgatacgccgactttgaccatcgaataaatttttaacggcagaatttcataacttggtccggtgacgaacgaagaaactaccacatcgtccatcgacagggtaaagcttaacacccagcccgccgccaccgctggcattgccagtggcagaatgatttttcgcagaatggtaaattcgctggcaccgagatctttcgccgcttccagcattcgcacgtcaaaacctttcaggcgcgaatacaccgtcaccaccacaaatggcaggcagaaggtgatatgcgagaacagcagcgaccagaagccaagctgaatacccagcagcataaacagcaccagcagcgaaatcgccatcacgatatctggtgacatcatcaccacaaacagcattccgctaacgaacggcttaccacgaaagcgataacggtacagcgcaactgccgtcagtgaaccgataagcgtagcaaacgtcgccgaaaacaccgccattgttagtgaatgctgcgctgcctgtaacaggctgtcgttgttcatcagcaggctataccatttggtggtaaagccctgccagttgatgccaaagcgcgagctgttaaaggagttcacaatcaaaataatgattgggatatacaggtacgcgtagatagcggtcataaaaccgccgcgaagcagtcgaccgatcattcgagttccaccttcttattcagcaaacgagaagcgcgccagtaaaccagcaacatcaggcccattacgatagtcagcgtaatgctggtagctgcaccaaacggccagtcacgaatattaaggaactggaccttgatgacgttaccgatcagcaggtttttcgcaccgcccatcaggtcggatacatagaacaggcccatcgctggcagcatcaccagcagacatccggcaataattcccggcatcgtcagtggaataatgatacggataaaagtctgtaacttgctggcaccgagatcgcgcgccgcctcaagcaacggcttatccagtttttcgatactggagtacagcggcatcaccataaacggcagcagaatgtaaaccagaccgataatcaccgcactgggcgtgaacatgatacggattggtgtgtcgataacgcccagccagagcaaaaactcgttgagatagcctttggtgctgaggaaaattttcagcccgtagatacgaattaatgagttggtccagaacggaacaatcagcagaaacagcagcagcggacgcaccttgtgtggcaacttcgccagaaaccaggcaaacgggtagcccagcaccaggcaggcgagggtggcgatcagcgccatattcagcgagtgcaatagcacttcaaaatagagcggatcgagcagacgcgtgtagttatccagcgtaaagaccattttgacaaaactggcgtcgtcgcgggtcaaaaagctggtgccaatgatcatcaggttgggcagaaagacaaacaacacaagccaaccgacaatagtgacaatcactacattctggaacttacttgtgttcttcatcagccagtacgacctcccagctttctacccaattaatggccattttttggtcgagagagtggtcaaagtcaggatcgtcttcattgaagaattcgctgaccatcaccatcttgccattttccagttcaacaaccgactccagcgtcatgcctttgtagttacgctcgcgaacgtaaccaatcagcccttcagcgtggttgtcgtcgttaatctcttcaacacgtaagtcttccgggcgcagcagaacatgcagtttttgccccggttcaacggcgaagttaacgtagatattacattcgcggccttcaacgttggcgcgtacgcgctgctcgtctagacgttcgatgacagtggcgttaaacatattgatttcgccaatgaagccggcaacaaacaggtttttcggctcttcgtagatttcacgcggcgtgccgtcttgctcaatgcgaccatcgcgcatcaccacaatcctgtctgacatggtgagtgcttcttcctggtcgtgagtcacaaagacgaatgtaatgccaagcttacgctgtaacgctttcagctcgttctgcatttgcttacgcagtttgtaatccagcgctgagagcgactcatccagcaacaacagacgaggcttgttaaccaccgcgcgagcaatggcgacgcgttgctgttgaccaccagagagctgatgcggtttgcgttgagcgaaggtttccaactgcaccatccgcagggcttccatcacgcggggcgtaatttcagcagcgggggttttttgcatgcgcaacccaaaggccacattttcgaacacggtcatgtgggggaaaagtgcgtagctttggaaaacagtgttcacatagcggttttccgccggaacgtgggtgatgtcctcgttatccagcatgatgcgtccggaatcaacagtttccagacctgcaatcaggcgaagaacggttgttttaccgcagccagaagggccaagcagcgtgaggaactcgccattgttgatagtcagatccagctggggaatgacctctttaccatcaaagcatttgcgaattcccgccaattgcaccagcggtgaaagcgaactcggttgtttattcaattttttactctgtcccatgtaaacgcaacggatggcttaccgatgcggggtttgtggttaaccaccttggtgactcttaatgagggcggtaattctacggcaaaccgcttgaatcgccaatctttgttgtgaattactggcttagctttatattcattaaggtaatgctgataaatattcccgcttgcaggggtaaaagtgacctgacgcaatatttgtcttttcttgcttcttaataatgttgtcacaaaaagtgagggtgactacatggataaactacttgagcgatttttgaactacgtgtctctggatacccaatcaaaagcaggggtgagacaggttcccagcacggaaggccaatggaagttattgcatctgctgaaagagcagctcgaagagatggggcttatcaatgtgaccttaagtgagaagggcactttgatggcgacgttaccggctaacgtccctggcgatatcccggcgattggctttatttctcatgtggatacctcaccggattgcagcggcaaaaatgtgaatccgcaaattgttgaaaactatcgcggtggcgatattgcgctgggtatcggcgatgaagttttatcaccggttatgttcccggtgctgcatcagctactgggtcagacgctgattaccaccgatggtaaaaccttgttaggtgccgatgacaaagcaggtattgcagaaatcatgaccgcgctggcggtattgcaacagaaaaaaattccgcatggtgatattcgcgtcgcctttaccccggatgaagaagtgggcaaaggggcgaaacattttgatgttgacgccttcgatgcccgctgggcttacactgttgatggtggtggcgtaggcgaactggagtttgaaaacttcaacgccgcgtcggtcaatatcaaaattgtcggtaacaatgttcatccgggcacggcgaaaggagtgatggtaaatgcgctgtcgctggcggcacgtattcatgcggaagttccggcggatgaaagcccggaaatgacagaaggctatgaaggtttctatcatctggcgagcatgaaaggcaccgttgaacgggccgatatgcactacatcatccgtgatttcgaccgtaaacagtttgaagcgcgtaaacgtaaaatgatggagatcgccaaaaaagtgggcaaagggttacatcctgattgctacattgaactggtgattgaagacagttactacaatatgcgcgagaaagtggttgagcatccgcatattctcgatatcgcccagcaggcgatgcgcgattgcgatattgaaccggaactgaaaccgatccgcggtggtaccgacggcgcgcagttgtcgtttatgggattaccgtgcccgaacctgttcactggcggttacaactatcatggtaagcatgagtttgtgactctggaaggtatggaaaaagcggtgcaggtgatcgtccgtattgccgagttaacggcgcaacggaagtaagcgaaaagggatgcggcatgtgatgccgcatccggcttaaatccaaacttacccttcgaagaaccaatacccgctattgaccagcgccgcgagcatcgcgaggaatgacggatcttccagcgcatcgccaaaattctccgcagtcagcgcaatgttgctggcgagtgcatccagtgccggacggtgcggggaatcgatcttctcaccattggcatacacgtcgtcgccaatgcgcaatacgcgcagaccacccaggcgcaccagcacttcaccttgtttcagcgcatcgtagatttcatccggctgataaggcggctctggcggcgcgatatccagttcatgacgtgactgggatataaactcgccaaaccattgcttaaagtgttccggctggttgatcaattcgagcatcatctcacgcagtttatccatctcttgcggcagaacatccgcaggatgagcgcgaggtggaacatccggatcgctgtagtagttgccgcccagttcacgttgcagcacataatcggcaaatccactaatcagttcccgcgtatttggcgcgcgaaagcccacggaatagttcatcgcattttccagcgcgtagccttcatgcgggaatcctggcggaatataaagaatatcaccaggctccagctcttcatcgatgatggcttcgaacggatcgacctgtaacagatccggatgtgggcagtgctgtttcatttgcagcttttcgcccactcgccagcgacgacgtccggtaccctgaatgataaacacgtcgtactgatcgagatgcgggccgacgccgccgccgggtacagaaaaagaaatcatcagatcatcaatacgccagtccggtagttcacggaacggtcgcatcagcgcggcggtcggctcatgccagtggttcactgcctgtaccagtaatgaccagttggtttcaccgagatgatcgtagctttcgaacgggccgtggctgacctgccatttgccatcctggtgactgaccagtcgactgtcaacttcgctttccatcgccagacccgccaactcgtctggagagatcgggtcaataaaattattaaagccgcgttttaacaccaccgggcgtttctgccagtgacgttcaagaaaatcgggccagttaagagtgagttggtattccatgttaagcatccacaggctggtatctgcaaccgattataacggatgcttaacgtaatgcgtgaagtatgggcatatttattcatctttcggcgcagaatgctggcgaccaaaaatcacctccatccgcgcaccgcccagcatgctctctccggcgacgattttaccctcatattgctcggtgatttcgcgggctaccgccagccctacaccttgcccagggcgtaaagtatcaacccgttgaccacggtcgaaaatgacctctcgcttgcttaatggaataccggggccatcatcctcgaccacaatatagagatgctcgtcggtttgccttgcagaaatttcgacaaactcgaggcaatatttacaggcattatccagcacgttgcccatcacctcgacaaaatcgttctgctcaccgacaaagctgatctctggcgaaatatcgagagagatattgacccctttgcgttgatacactttgttcagcgctgaggtgagattgtccagcagtggggcgaccggatgcagctcgcggctgagcaatgtcccgccgcgcatactggcacgatgcaggtagtagccaatttgctgtgaaatgcggctgatttgctccagcattaccggctcagcatcactgacgctcatcttttcactacgcagagaacgcagcgtactttgcagcaccgccagtggcgttttcagactatgggtcaggtcggtgagcgtcgtacggtatttgtcgtaacgttcgcgttcactttttaacaatcggttcaggtttcgtaccagactggtcagttctcgcgttgtggctggattgagcaattcgcggttatgttcttccagttcgcggacttcttttgccagggcttcgatggggcgtaaactccaccaggcggcgacccacagcagcgggatcactaacagcagattggctgagagcacatagataaaccagctccagaccatataggaactttttagctccaccggaatggtatccaccaccacaatggttaattttggcatccgcgatgttgccgggtagacgtttactgccaccgagtgggtcatctccgcgtcgtcatcatcttcccgcacttcctgcaactgttgctgtatcgaatgatctccactcagcaagaggctggtatcgttaacatccgcttcaatttcatgaaaaccattcgatttcagccagtcaggctggatcatcttcatcagccagggcacgtcacgttgcgcccataaaagctgcccgttctcatcataaattagcgtcatggtggggctttgcttgtcgatattttcgggtaactcgacatgcaacttattgttttcccacttcgcaagggtatagaacagattgctctcgccacgtaacagccgaaacgtagttttatcgaaactgacgctataaccgatcagcgcgaccattccgtaggcaagcgaaagcaccagtactaccgctgccgttgccaacagaaaacgtacccgcagcgagagcgggaaaaaaagacgcagtaattttttcatcagcgcaattcgaacagatagccctggccgcgaacggtggtaatcacttcttggggatattgtgcctgaatttttttgcgcagacgtcccatcagtacatcaatggtatggctttcccgcagctccgcatccggatagagttggagcattaacgaatctttgctgaccactttgccattattgcgtatcaacgtttccataatagtgtattcgaacgcggtcagtttgatcacttcgtcattaatagataattcacggcgagagagatcaacctgaaacggggggagcgaaatgacctgtgaagccagaccgctattacgccgcattaatgcctgcattcgcgccatcacctcttcaatatgaaacggtttagtcacataatcatcagcaccggcacttaatacttcgactttgtcctgccagctttcacgggcggttaataccagaatcggcagtgaaacatcgttgctacgccagcggcgaatcagtgacagaccgtcctcgtctggcaatccgagatcgacaatcgcaatatccggtatatgttcattgagataataatcggcttctttggcatcttctgcgtcatcgacctgatgaccagcatcctgaatctgaactttaaggtggtgacgtaacaacgcattgtcttcaacaaccagtacgcgcatttttatttctccctgtcttaattattaaaatagtgtaacgcgattatgtggttatgggggtaaacattaaataaaccagcggggaggggaggtaaagtgaaaaaataaaaagcggataatcttaataagcaggccggacagcatcgccatccggcactgatacgaggtttatttcagctcatcaaccatcgtgatagctcgaccaatatagttagccggcgtcatcgctttcaggcgggctttctcttcttctggcaacgccagaccatcgataaactgcttcatgccttcggcgtcaacgcgcttaccgcgagtcagctctttcagcttctcgtacggtttttcgatgccatagcgacgcataactgtctggattggttcagccagcacttcccagttgtgatccagttcatccagcagatggtcacggttcacttccagtttgctcacgcctttcagggtggattgatatgcaatcaaggcataaccgatacccacgccgaggttacgcagcacggtagagtcggtcaggtcacgctgccagcgggaaaccggcagtttgcttgccagatgctgcaataccgcgttggaaaggcccagattcccttcggagttttcgaagtcgatcgggttaactttatgcggcatggtggaagaaccaatctcaccagcaatggttttctgtttgaagtggttaagggcgatataaccccagacgtcacggtcaaagtcgatcagaatagtgttgaagcgcgcaacgcaatcaaacagttcggcaatgtagtcgtgcggttcgatctgggtggtgtacgggttccactgaatacccagcgaggtgacgaactcttcgctgaactgatgccagtcaacttccgggtaagcggcgatgtgggcgttatagttaccgaccgcgccgttgattttgccgaggatctccacctggttaagctggcggtactggcgctccatacggtaggcgacgtttgccatctctttaccgatggttgacggcgtggctggctgaccgtgggtacgagacagcagcgggatatcgcgatactgaacggcgagatctttaatgccatcaatcagttgacgccagtatggcaggatcacttcatcacgcgcggttttcagcattaatgcgtgggagaggttattgatatcttccgaagtacaggcaaagtggatgaattcagaaaccgcgtgcagttccgggatctccgccactttttctttcaggaaatactcaaccgctttaacgtcgtggttagtggtacgctcgatagttttgatgcgcgccgcatcttcttcgctgaaactggcgacgattgcatcaaggtaaccgattgcgtcggcagcaaaagcaggaacttccttgatcgctgcgtgcgcggccagtttttgcagccaacgtacttcaacttgtacacggaatttcagcaaaccatattcgctgaaaatcccgcgcagcgcgctgactttatcgccgtagcgtccatcgacaggggaaacggcggtcagtgaggataattccatagatcacaactccggggttaaatgagcaagaatttgttttgcctgagtggtcaggcgattacgagaaaacatcagttgcagacgtccgccgccgacctggtgccagagcacggcggcgcgaatgcctgccagcagggttgcgcgaactttcgcctgcacttgtgggctttgcagtacagcaggggaaccggtgacctgaatgcgcgggccaagcgggctaatcacatcaacatagatagcagccatcgcgctcatcagcgtttcggactgtaaatcgaagtgttcgagctggcgttgcaggccgttgatccggttgcccagagtgtcgagcgcgcctttcgctgaggagagtttgcgctcaagcaccatcaagctgagtgtgtagcgggttaattcggcgtttaagccctggcgactgctggcattgagcacgccgagcagggtttccagcccgacgcgcaggttggcttcgctaccgccaaaaaccgccagcgtcgagctggggttcatatcaataatactgttgagtgagacgtgtagcgcatcggcatcacaatgcccctggtgagcgagttgttgcaccaggcgtgccgactgacaaataccggccagggcgagggtgatgtcatagtaattctttgccacgttcactgcttccttgttttaagtaaagataataatcagaccggcagcggcagacgctgctcaataataccgccaccgaggcacacttcaccgttatagaagacggcagactggcccggcgtcacggcggcaaccggttcatcgaaaatcacttcaatgcgatcatcgtccagcgccttgacggtgcaagggatatcggtctggcgatagcgggtttttaccgtgcaacgcatagtgccggtgaatggttcgcgatcgacccagtgcaactgctgggcaatcaacccgacagacatcagccgcgggtgttcatggccctgagcgacaaccagaatgttgttttcgacgtctttgtccaccacataccacggttcttcggtaccttctttggtgccaccgatacccagacctttacgctgaccgagagtgtgatacatcagcccctggtgctcaccaatttcatcgccatcgacggtaatgattttgcccggttgcgccgggagataacggcccaggaactcgcggaatttacgttcgccaatgaagcaaatgccggtagagtcttttttcttcgcggtgaccagaccaagatcttcagcaatcttacgcacctgcggtttttccagttcgccgaccgggaacaggctttgcgcaatctgctcatggctgagcgtataaaggaagtagctctggtctttattgctgtccagaccacgcagcaggcggctcttgccatcgacatcggcccgacgtacgtaatgaccggtagcgatataatcggcacctaaatcttcggcggcaaattcgaggaaggctttaaatttgatctctttgttgcacagaatatccggattcggcgtgcgaccggctttatattcggcaaggaacagttcgaagacgttgtcccagtactcggcagcaaagttaacggtgtgcagttcaatgccgagcttgtcgcagacagcctgggcatcagccagatccgctgccgctgtgcaatattcctcaccgtcgtcttcttcccagttcttcataaacaggccttcgacctgatatccctgttgttgcaacagccaggcagaaacggaggaatcgacaccgccggacatgccgacgattactttttttgcggtttcagacattggatcactcacgacattgaacttcaaggcggcgtattctatcacgcagccttttagatgacaccctttgtaaaaggccagttaaaatcgccaatcatctccagcggataacgttgcccgctttgataacaacgaatactttccgccaccagcggcgaacgaagatttgacgcctgtaaaatttcttcggcgctgacccaacggcagcagtcgatatcgctgtcatgaggctgggtcgggcatatttgctcaagctcaatggcaaagaggaaacgcaaaaacggcgttttatctggcgcaatccactgatgcatacgaataaagtgttgcggctgcgcgctgatgccggtttcttcccacagttcacgggcggcggcttccactaaggtttcatcggcttccagatgcccggcaggttggttccataacgctttaccattaatcgtctcttcaacgactaaaaatttgccttctgcgtgcaccacgcaagcaacggtaacgtgcggtttaaacattttgcatccttaatctgtcacttctcgccattcaccattggcaagattatccaaagagtaatcacccatcgcatagcgaatcagtcgcagcgtggggaagccaacatgggcggtcatgcggcgcacctggcgattacgtccttcatataaggtgatcttcagccagctggtgggaatacttttgcgttcacgaattggtggattccgcggccataaccacgcgggttcgtcaaccagctccgcgccggcgggcagggtagggccatcatttaaggttacgccattgcgcaaggcttcaagtgcgtcttgtgtgggaataccttccacctgcacataatagatttttccggtgcgtttacccggctgggttaaacgcgcctgcaacgcgccgttattggtcagcaccagcaacccttcgctatcgcggtcaaggcgacctgctgcataaacaccctgaaccgggatgaattcttttaatgttttgcgtccggcttcatcggtgaactgcggaagaacatcgtagggtttattgaacaggatcacacgcgtgggctggttttcaggtttacgcctggtagaacgttgcgagctgaatcgcttaacctggtgatttctaaaagaagttttttgcatggtattttcagagattatgaattgccgcattatagcctaataacgcgcatctttcatgacggcaaacaatagggtagtattgacaagccaattacaaatcattaacaaaaaattgctctaaagcatccgtatcgcaggacgcaaacgcatatgcaacgtggtggcagacgagcaaaccagtagcgctcgaaggagaggtgaatggaaagtaaagtagttgttccggcacaaggcaagaagatcaccctgcaaaacggcaaactcaacgttcctgaaaatccgattatcccttacattgaaggtgatggaatcggtgtagatgtaaccccagccatgctgaaagtggtcgacgctgcagtcgagaaagcctataaaggcgagcgtaaaatctcctggatggaaatttacaccggtgaaaaatccacacaggtttatggtcaggacgtctggctgcctgctgaaactcttgatctgattcgtgaatatcgcgttgccattaaaggtccgctgaccactccggttggtggcggtattcgctctctgaacgttgccctgcgccaggaactggatctctacatctgcctgcgtccggtacgttactatcagggcactccaagcccggttaaacaccctgaactgaccgatatggttatcttccgtgaaaactcggaagacatttatgcgggtatcgaatggaaagcagactctgccgacgccgagaaagtgattaaattcctgcgtgaagagatgggggtgaagaaaattcgcttcccggaacattgtggtatcggtattaagccgtgttcggaagaaggcaccaaacgtctggttcgtgcagcgatcgaatacgcaattgctaacgatcgtgactctgtgactctggtgcacaaaggcaacatcatgaagttcaccgaaggagcgtttaaagactggggctaccagctggcgcgtgaagagtttggcggtgaactgatcgacggtggcccgtggctgaaagttaaaaacccgaacactggcaaagagatcgtcattaaagacgtgattgctgatgcattcctgcaacagatcctgctgcgtccggctgaatatgatgttatcgcctgtatgaacctgaacggtgactacatttctgacgccctggcagcgcaggttggcggtatcggtatcgcccctggtgcaaacatcggtgacgaatgcgccctgtttgaagccacccacggtactgcgccgaaatatgccggtcaggacaaagtaaatcctggctctattattctctccgctgagatgatgctgcgccacatgggttggaccgaagcggctgacttaattgttaaaggtatggaaggcgcaatcaacgcgaaaaccgtaacctatgacttcgagcgtctgatggatggcgctaaactgctgaaatgttcagagtttggtgacgcgatcatcgaaaacatgtaatgccgtagtttgttaaatttattaacgggagcgtaacgctcccgttgttttttgttaggctgctaacggttatcaaaattttatcaaaaaaagttatcaaaacccctcggtagttttggggtaggctggccggtcaggtggtagttctactactagtctcccacatagatattccttagctttttattattgctggcggacgctcgttaatatttaaggtcttcattgattaagacatccccaaagttagttatgtattcactgttattaggacaattatgaattaccactccttacacccgctcaaatattgttaaattgccggttttgtatcaactactcacccgggactcgccaggggacagccaacaggcattgggtgcaatcaccttagcgttcaggtacatgcggaatgtaaaaaaggccgcgagcgcggccccttcacatacatctttagtactgagactgtttaacctagggaattattatcgtattatattgcattacaactcccaacagtgacatatgaacttcctgctttactccacgactttaatatttcaaggccatgtgaagaacatatttcttgcactgcgagttcatcgagtaatccatagtaagaaacactttttgaatttttgtaaatgtatccgtaaagatgttttcttcctgtttcgtattttttgaagtatgagcttttatattgatttacaataagagtctcacctcctgattttagtaatctcttgatgctaagaactattttgtcgattgtatcccgacaaggaacggcagagagaacattagagcaaaggatgaaatcgtaacccccaattattttgtcgacatcctcgaaagcaactgtatttgcatttttataatatcgtgggacatagtcaataattttagttttaattcctctaataatttgctctctttcaagttgccttttcgagtctagaaaagtaacttcatcaaatttactgattaattcatcagaatatctaagttttccgcagccaaaatcaagggcgtggccatttttctcaatgcttctaatatactcgcaaagatatctagagggcatcgtatgaggttttgctgcattctctgagcgaatattaactccgtgcatattatagttcaaagcaagtaccattcaattaatgttatttttagtgaaaaattcttttattttatcgtccgggatttttccgacttgactttcagttctgggcttaactgtcaaagcaaagataataccactcactgagaatgataaaattacaaaaaagaataaagacagcaaagaaccttcaacatgaaaaatatccatttgtttgcaaaaaaagattattaggaaggaaattaatgcaattatcgaaaattcaaaaaatatccaaaaatagtatactttattccagaagagttcaatataatgtttgtcttcaatttttcttacttcagggtaatatagattgctcattacattgtgagcttcatctttatttaattttctgttgactccagctctccgtgataacggttttataattagatgcttatcccaaagatatcgcacccgaagtagtttggctgcattgttatgtaggtctaacgcaccgctaattaaatatgcaaaaatcgcaaaagcacaaggtaatataccaaaagatagtgcccaattaataaagctctcatgatctttaataggtgggacatacttggttggtaatgttattaaagggatgtattcgtaaataactagaagtatgcaatatattagcgtatttaagaaagttgctttatgaagtttaggcaacatttcattataatttttggggggttcgaacatattattcacctgagtcacgctttaggatagtgtaatggtaatatttaattaagtgtcattatatacttttcagtaggttagttacaattttttgtatctgttcaggctgacctagcttcgctgacagacaatattgtgatcagtagcacgtatcgaggaggagtagcgctacaaatttgacgctgggtgagaatctgaaattgatagaaatgaaataatgaaataatgaaatgatgaaatgatgaaatgatgaaatgatgaaatgatgaaatgatgacagagtgtccagtgggcacggatggtgtcttacgacatgcttaccttaatcgttcccagtgtgcctatagcagatattctaaacatgtcgataattcattacgcatatagtatcgaacatagaaaaaactgaagattcatcttattttgtatatactacctagcccaacaatgtagaggttaacgaaaaatgcgctcaccaatttgtcatcttttctcagcaattaattcatcaccatttaagattgcaccagagaaggagcaagatcttaaaacgatagttgacgacaaaaaaattataatttcagttgtgagtgaacctggttttaatatccgagtcaggaagaatgagagtaataattcacatgaaatagttctaacagtagcttcacttgaatatatttgggcattttccaatttcttttgggtttttacgcaagagtactccaaatctcagaaaaataatgatgagcactttgatttaacaggaaaaaataggcttaaaaagtctgatgaacttcttaaatgggcaaggaaaaacttgcaaacaacaggttgcgaatcatggcctaaaaaatgtcccaagccagaagcatatttacaaggaagcgaagactcacaagttgctagcgagatatttctttgtgctattgcttggattcttcatcatgaaataagtcatgttgttttacagcatccattggtcactacagcattctccactcaagaggagcgtgaagcagattcacatgctacaaaatggatattaggcaacctgtatgaatccgctcctgaattaaagaaacgtgcacttggcattgctacggcagtgctttgtatacaaagcttagaagttgaaaattacttctgtttacaaaatacacacccagctgcatatgagcgtatatattcgaatatttcatgctaccctgtcggaaatgaagagttgattgaagctctatgtacagtgatgcttcaatatcttttccatggcaaaaatatcaatgtgaatctagatggggagtccttttcatcgattttaggtgatcttctctgtgatatttcacgtcttaccagtaactgatatggctgtccgccgctcgcttaaagtggactttttagtttttatcatgtgcggtgagaaattcaatgtggcgttgagatgcttaaaggttcacaacgctactttgctccatcctttacctcgatcatcatgataacgatcggtttgttgttgtgttttatgaccaagtagtttttgtgtgtctaacccctgttctttatacagacgttcagataaagacctttgctcatggaatgtcgcaggtgaaccctctccccagtcaattcttgctaaatctctcgctttactaaaattcatcgtcaatgtattggctttaacctgcgctccgcgctctgcttgtgaagttgaacgaaaaaaatgcactaagtatgcactgactgcatagtcacggcagcgggctactacatcgcgtaaactccagttaatcgcattgaggcgaagagaaagaggaattgcgattttgctcccggtcttttcctgaatgacatgaagatgatcatcccaaatatcgctaaatttcatacgcgaaatatcacctaaccgctgaccagtaaccagcgctaacagcatggcatttcccatgtaacgatgagtagcgtctgcgatatcgaagatttttttccattcttcaaggctcagccgttgtcgggtaatttttcttcttggttgtttagtggctaatgctgggttatagccaggaggtacttctccgtagtgctgcgcctctttgaaaacatcaatcaggacggagcgaactacttgtgccattcttggccgcccagcggcgatatactcatcaagcaattgtgctatatctctgacatcaacggctgagatcaacttcattcctgctcgttctctgagcaaggatactggtttagctttttgtttataggtgttgagtcttatatcaccacttttaagcctgtcatcctggatcgcttgatagcgatctaaccaggttgacgttgtgatagcctttcctttgctggttgcgatcctgtcactgatagccagaatctgccgggttctttgttcagccaggcgagtgttggcctcagtggcaatagcgatagcttcagcttcgtttgttcccaaagcatggaattttcctgtcactggatgcttataccgccaatagactttatttaccttcctactataaagcggatataagttagggactgaaacattattcttacgcggtctggctgccattactcaaaatccgttgcaaaagtaatgagtcatttttcttgattacaggtgttaccaactccccaactaactcggcgtcctcacgcactcgccataaccggccttgtttcatggccggtggacaaaataaattctgcttagcataacgacgcaatgtggacacacttggaggattacttctgtatttttcagcagcccattcttcaagagttaacatttgaagcatatgcgatcaccttattactacactaactgcttagtctcagcatatcgaccctgcacggtcggttagtttctccacaaaacagagaagagcacctgtggccacagctatcaggatgggtcgggttattaacccgtcatccggggatactcttctctgttttgtaaaaagggcggtaccagaaaggactaaggaaaaaactggtaccgccaagactacacacagcataaagttgtggtgtcgggtgcccccggtgcctggcgaaggttgcacaccaggcgggtgggtatccacagaaggtcgattgtcagcctcaaccttaacccgcgtgcgctgagccgcattcaccacaacgctaaggattctctctggttgaaaatacttagctgttatgtgcctgtcttttcaccacttcaggctcggtggtatgctggagttctcacacagccagcaagcaaggaaacttaatgaaccagttttatgttcacgttcgtctatttgaagacacagccgaacagaccaaaaaatttgaagaattaatgcttaactttctgtaccagaaaacagttaaagagtctgacgatagctgctgcagactgattccagagggatatatcctcaaaagtacaatgaactgccaacaaatccttgatcaaacattttcaattgctaacagtgccggtgttgacgcaaatatatttgtctgtaaatttgaacaaagcgcatgcttacttccgtctgcttccttagttggtaacgatttcgttcattacgatcttacgcctaagcccatcaagctcgattcttaaagccttaaccattgtgtcgtgataaacacggctcaccttctctccattgcatggcagaggggtgagtgtgttagccatgaaattcatgaactcggttcgaccaggggcttgcgccccgcaagtctttaatgcctgttttgctaacaaaatgcgggcctcagtgcctgcatttggctctatctgctgcaaacgtttagcgtcttccagcaacaatgcgatcacatgcttcaaattctgctcattcatctattctctccactgaaatcatccgctaacgaatcatcccggtcttcgtacgtaccgggcgggctacttcgtgggcgtcctgcctgtttgttgtttctcttgggtacattatgtatctcaaaggtacattgtcaagtataaaaaaacctgccgaagcaggttcataaacattgattaggctttgattttgtatcttcttggttttcctgagaaaatcacagtaccaattatagagcaattaccgttgatcttaatgtaaggctcaggccagtttgggtttaacgctttgagataacgctgtgtcccatcttctatcaaccttttgaaggtggtttcacctgtatcgtgcatcaatgcaataacgtcgtcaccgtggcaggcaggtacttcaggatcgacaaaaatcatgtctcccgggcggtactcatcaatcattgaatcacctattacccgcaagatataagtcatttccccacagggtacagggcagggatacgtttctgctgtgctcaaatcaacctcagaatatccaacttctttccatgctccggcctgtacccatgatatgacagggactaatgtgatttgtttattagtgattgaaacatcaggtttttttgtgatgttcgttgtctggtgttcttgatcgagccatcctacaggcaggtcgaaacatttttcgatgtgtcgtgccatgctgtcaccgatatttttagtagcaccatctcccataaacctgctggtctgggttggctcgcgatcaatcatagtggcaaaggaagaattcccgccaacaccatctctcagttttctggcgttagaccgccggatgtcatggattgttttcataacgaaattaaaacccttgtaccgttaaggtacaagtatcttgaaggttcatttcaatcatgtaatatgtacaccggaggtacatattgtatgaaagcgtattgggactctttaaccaaagaacagcagggcgagttggccggaaaagttggctcaacacctggctacttacggctggttttcaatggctataaaaaagccagttttgtgctggctaaaaaacttgagcaatacacatcaggtgcaattacgaaatctgacttaagaccggatatctatccgaaagattagcagaacactttcaatttttaaccacagaacgatgaggctaatcgtgggtaagcatcactggaaaatagaaaaacagcctgagtggtacgtgaaagctgtcagaaaaactatcgcggcgttgccgagtggttacgctgaagcggctgactggctcgatgtaacagaaaacgctttattcaaccgccttcgtgcagatggcgatcagattttcccgctgggatgggcaatggttttacagcgtgctggtggcactcacttcattgctgatgctgtggcgcagtctgcaaatggcgtctttgtgtctcttcctgacgtcgaggatgtggacaacgccgatattaaccagcgtctgctggaagtcattgaacagatcggcagttattcaaaacagattcgttcagcaatcgaagacggtgtagtggaaccgcatgagaagacagcaattaacgacgagctgtatctctcaatttcgaagctgcaggagcatgcagcacttgtctacaaaattttttgcatttcagaaagtaatgacgcccgcgagtgtgcagctccgggcgtcgtggcgtcgattgcttctggttgtggagaaactaacgcatgaacagtttaacaacacactaccgtcgctcgcaactgattgcgcttcctgtaccgggtggaaaagcgaaggtggaatattgctatgcagtgaatgtaccaggtgacagggaaattgtaacccacagctttgcagagtgggctgtgggtgatttcaaccggcagaaggagacagtcctttgcgacaagttaaccgctggttcaaagatcactacggagtgcccgtcagagtcattcgttgggagccggaaacacaacgggttatctacctccgcgaaggttatgagcatgaatgcttcagcccgctcgaacagtttcgtcgtaaattcagggaaatagaggtcggtcatgagcactaaattaaccggctatgtatgggatggttgcgctgcatcaggcatgaagttatccagcgtggcaattatggcccgcctggctgatttcagtaatgacgaaggtgtgtgctggccatcaattgaaaccattgcccgtcagattggcgcggggatgagtaccgtcagaacggctatcgcacggctggaagcagaaggctggttaacgcgtaaggcgcgtcgccagggtgatggttcatcaccccactgtgccgtggtggatgaatatcacgagcacgccacagatgcgctttacaccacgatgcttaccgggatgggggcgcgacgccagccactgatgtgggccattaccaccgccgggtacaacattgaggggccgtgctacgacaaacggcgggaagtcatcgagatgctcaacggctcggtgccaaacgatgaactgttcgggatcatctataccgttgatgaaggtgacgactggaccgacccgcaggtgctggaaaaagccaatccaaatattggcgtgtcggtttatcgcgaatttttgttaagtcagcagcagcgtgcgaaaaataacgcccgtctggcaaacgtctttaaaacaaaacacctcaatatctgggcgtcggcgcgttcggcgtatttcaacctggtgagctggcagagctgcgaggataaatcactgacccttgagcagttcgaggggcagccgtgcattctggcctttgacctggcgcgtaagctggatatgaacagcatggcgcgactttatacccgcgagattgacggtaaaacgcattactacagtgtggccccgcgtttctgggtaccgtatgacacggtgtacagcgtcgagaaaaatgaagatcgccggacagccgaacgctttcagaaatgggtggaaatgggcgttctgaccgttaccgatggtgcggaggtggattatcgctacatcctcgaagaggccaaagcggcgaacaaaatcagcccggtcagtgagtcacccatcgaccccttcggggcgaccgggctgtcacatgaccttgctgatgaagacctgaaccccgtcaccatcattcagaactacaccaacatgtccgatccgatgaaagagctggaagcggcgattgaatcggggcgctttcatcatgacggcaatcccatcatgacctggtgtatcggcaacgtggtcggcaaaaccattccgggtaacgatgatgtggtgaagcccgtcaaggagcaggcggaaaacaaaatcgatggtgcagttgcgctgattatggcggttggcagagccatgctgtacgagaaagaagacacgctgtctgatcacattgagtcctacgggatccgctcgctttaactgaggtaattatgatcatgctgattctcgcgcctctggtgggcgtgctgggtgcgcttttgctggcgtatggtgcctggctgatttatcccccggcgggttttgttgttgccggggcgctgtgcctgttctggtcgtggctggtggcgcgatatctcgaccgtacacagtcgtctgtcggcggaggtaaatagtgttcttttcgggattatttcaacgaaaaagtgacgcaccggtgaccacgccagcagagctggcggatgccatcgggctgtcgtatgacacctataccggaaagcagatcagcagtcagcgggctatgcgactgacggcggttttttcctgcgtcagagtgctggcagagtcggtcgggatgttgccctgcaatctgtatcacctgaacggcagcctgaagcagagagccaccggcgaacgtctgcataaactgatctccacgcatcccaatggctatatgacgccgcaggagttctgggagctggtggtcacctgtctgtgcctgaggggaaacttttacgcctacaaagtgaaagcatttggcgaagtggctgaactgctgcccgtcgatcccggctgtgtggtatatgcgctgggaaggtgtcagcgatggcctgaaggtgaccgccgggagtgttattcagcgcgatgacctggtgcagtacacgacaactgacgatgcaaccagctccggtggtgtcctgcgcgtgccgatcgcctgctcaagtgcaggtgcggtcggtaacgctgacgacggtacggcattaatcctggtcacgccggtgaatggtctgccgtcttccggtgtggctgacaccctgacaggcggatttgatactgaagagctggaaacgtggcgcgcccgcgtcattgagcggtattactggacgccgcagggcggggctgacggggactatgtcgtctgggctaaagaagtgcccggcattacccgcgcatggacataccgtcacttgatgggaacgggaactgtcggtgtgatgattgccagcagtgacctgattaatcccattccggaagaatcaacggaaacggcggcaagacaacatatcgggccactggccccggtggcaggctctgatttgtatgtgttcaggccggtggcacatacggtggattttcatatccgcgtgacgccggacacaccagaaatacgggctgccattaccgcggagttgcgttcgttcctgctgcgtgatggttatccgcagggagaactcaaggtatcgcgtatcagtgaggcgatttccggtgcgaacggggaatacagccatcagttgcttgcaccggtggacaatatctccattgcgaaaaacgaactggcggtactggggacgatttcatggacgtgacaaacgatgattacatccgcctgttatcggcactgttgccgcccggtccggtgtggtcagccagcgatccggcgattgccggtgcggcaccgtcattaacccgtgttcatcagcgtgcggatgccctgatgcgggagctggatccgcgcaccaccactgaactgataaaccgctgggagcgtctgtgcggtctgccggatgaatgtattccggcgggaacgcagacccttcgccagcgtcagcaacggctggatgcgaaggttaacctggcgggcggcatcaacgaggatttttatcttgcacagcttgctgccctgggcagaccagatgccaccatcacgcgatacgacaaaagcactttcacctgctcatcggcctgtactgacgcggtgaatgcgccggaatggcggtattactggcaggtcaacatgccagccaccaccaactccacctggatgacatgtggcgatccctgtgattccgcactgcgtatctggggtgacaccgttgtcgagtgtgtgcttaacaaactctgcccgtcgcatacctacgtaatttttaaatatccggagtaatccatgcatcgtatagacacgaaaaccgcgcagaaggataagttcggcgcgggtaagaacggttttacccgtggtaacccccagaccggcacgcctgccaccgatctggatgatgactactttgacatgttgcaggaggaactttgcagcgtggtggaggcatccggtgccagcctggagaaggggcggcacgaccagttacttaccgcacttcgcgcgctgctgttaagccgcaagaatccgtttggcgatatcaaatcggatggcactgtgcaaacggctctcgaaaaccttggtttgggagaaggagcaaaactcaatgcagcaacggctacattaggacgcaccggtttcatagctataccggttatgattggtggtattgagcaatcagtaatcattcagtgggggtggaatgccgcaaaagcatctgcctctgggggggatggaaatacagttgtattcccggttgcgtttaataatgcctgtgttgccgttgttgcaaattatgacaatgtcagcgcacctatcaatgcagtggcaacggggggatatacaaccacttcgtttttattacggtgcgcagctcaaacgggtagttattactataactggattgctattgggtattaagatgaaaatatactgttgcttaaataccgttggtttttttatggatggctgtggcgtcattccgccagattctaaagaaataacggcagaacactggcagtcattattaaaatctcaagctgaaggaggcgtgatcgatttttctgtttttcctccttctattaaagaggttatccgtactcatgatgatgaagtcgcagatgcgaactttcaaaagcagatgcttatctctgatgcaactgattttatcaatagcagacagtggcagggtaaggctgcattgggaagacttaaagaagatgagctgaaacaatataatttgtggctggattatctggaagcactggaactggttgatacatccagtgcgccagatattgaatggcctacgcctccggcagttcaggccagatgacatccggcgcggtgctggtatctgttgccgtcaccgcgtcaatgtaatccagcacagcgttaagtctggttgtttctgcctgcgtcagtttacgtccggcctgcaatttcagttgaatcagactaatggaagccattgcagcatcaatcagtgactggcgctgtgcttctgccgcgtctactgcggcgctatgctgtgcttcagtatcggtcacccatttctcaccatcccatttatcgtatggagataaaggggcgatagtggttgtattttcagggtaatcacccggagctttgatttcttttgattctccagttttggtgctatagaccgtttcaccgcgatggtctggcacatattcccatgagttaaaatctgcagaacggcagattgcataaccagccttatgtgtaccaggggcatctaaacaggaacatgccggaatgccgacaccaacggcaagatattcatttgaagtggaaatatattcccgtgtttcaccatcgtagttataaacggtaacatcccctgcctttgttgcaataaggtcactatttaatattgctttatgcatcaggctgccctcacgatatagttaaatgcaatattacgcggacgcgtttctgaggctgcggcacctaaaccatccactgattgtttatatgttttaaaggttccataatccggggctggtaatccggcatcgtttgtgtttcctcttttgataatgtcagtgccactatttacccatatttcatcaaaatagaaattaatcgttgcatcagtcacaatcgtggatcttgacggtaatccatgagcatgatcctccgttgcatacccctgaatacttaaaatagagcgacctgtatcaatcccccgcccgtcatcccagccacgaataaactcaccacgtaaatcaggcaatttatttgtcggataagcctttgccagttccgggtattcttcagcagaaaaagcggcaccattgcatttcagccagcctgttggcggagtggctgaaggccacggaaccgggacaccaacaggtaatgcagagccttctcccaaaccaacgtttatgaaaatgaagaaataacaagcaaatggcatcattcctgcttttaccagggggatttaacatgcttattggctatgtacgcgtatcaacaaatgaccagaacacagatctacaacgtaatgcgctgaactgtgcaggatgcgagctgatttttgaagacaagataagcggcacaaagtccgaaaggccgggactgaaaaaactgctcaggacattatcggcaggtgacactctggttgtctggaagctggatcggctggggcgtagtatgcggcatcttgtcgtgctggtggaggagttgcgcgaacgaggcatcaactttcgtagtctgacggattcaattgataccagcacaccaatgggacgctttttctttcatgtgatgggtgccctggctgaaatggagcgtgaactgattgttgaacgaacaaaagctggactggaaactgctcgtgcacagggacgaattggtggacgtcgtcccaaacttacaccagaacaatgggcacaagctggacgattaattgcagcaggaactcctcgccagaaggtggcgattatctatgatgttggtgtgtcaactttgtataagaggtttcctgcaggggataaataaagttaaagacactttgtgtacaaaagaaagtaaaacaacagcaacttgttgcaattttatcaataaaagtagtattgtcgtgaaaaattgattaaagattaatattatgcatgtttttgataataatggaattgaactgaaagctgagtgttcgataggtgaagaggatggtgtttatggtctaatccttgagtcgtgggggccgggtgacagaaacaaagattacaatatcgctcttgattatatcattgaacggttggttgattctggtgtatcccaagtcgtagtatatctggcgtcatcatcagtcagaaaacatatgcattctttggatgaaagaaaaatccatcctggtgaatattttactttgattggtaatagcccccgcgatatacgcttgaagatgtgtggttatcaggcttattttagtcgtacggggagaaaggaaattccttccggcaatagaacgaaacgaatattgataaatgttccaggtatttatagtgacagtttttgggcgtctataatacgtggagaactatcagagctttcacagcctacagatgatgaatcgcttctgaatatgagggttagtaaattaattaagaaaacgttgagtcaacccgagggctccaggaaaccagttgaggtagaaagactacaaaaagtttatgtccgagacccgatggtaaaagcttggattttacagcaaagtaaaggtatatgtgaaaactgtggtaaaaatgctccgttttatttaaatgatggaaacccatatttggaagtacatcatgtaattcccctgtcttcaggtggtgctgatacaacagataactgtgttgccctttgtccgaattgccatagagaattgcactatagtaaaaatgcaaaagaactaatcgagatgctttacgttaatataaaccgattacagaaataaaattatttattaaagtcacatttaagacgtaataccctacagggtaaaaattttctctgatcttaacttctgcaaatgttaactgctatttttatgctaaaaatggttatcaaaactcaaaaacacatgtttataatcaatgagttatagaaatgctaagggctaatgagttatatgcaaattagtaaaattatgttgctatgtcagatagttacgatttagtcatctaactaatgctgcgccatatgggttggactgaagcggctgacctgattgttaaaggtatggaaggcgcaatcaatgccaagaccgtaacttatgacttcgaacgtctgatggaaggcgctaagctgctgaaatgttcagagtttggtgaagcgatcatcgaaaacatgtaatctctccatgtgttaaatattgaaacgggcgtataacacgcccgttgttttatttatgtggatattattaatagcatatcgagcatatttatatgaagcccattacttgagcccatatgggcatatttttataatgcaactattatgtaaacatttatttgttattttgctttctcctggaggacactcttgactgcttttgagtaaactccataaatccttgttgaatggtgcgatgtgataaatagtaataggatattctttatccttaaggataataccagacttaaccggtgtaaatatactgccaggagggagaaatatagtagattgataccagatgatcattttcatattaccccatatggctgaaaaagatataccacatgtaggttgaattaccgtgtcaattactatccacttcatttgttatgtcttatcccacggtatttaatatggttcattaggatgtttatttcttgattttgcatatgagtatattacccccccctcaaaaaaataaattaattaaaatgatggcttatataaaataaaatttaaagcaaggaatctcaatggatgttaaacaaaatgagattttgtgaaagcaataaattattgacttcgttttagatttgtttagctataatgttatacattcaaatgactgaacatcctgtaattaaaacatagcctttatgctactttgtgccaatttgctaaacattatggttgcctttttatataacgataataatgaatataagcatgacatgagaataaggtttcaatttttgagttatataggaatgatttaacctgttcctggctaaaatacatataaccggatgatgactaaaccaaaatacatgtgcgttaagtattgaaacggacgtgtggcacggccgttgtttttataaatatgttaaccgttataaaataacgtatcaaaagtcaagtgatcacatttcaaatatcaagttgatagtattagtctggtgattatttatgggtgacaataaaaagacagtattaatcatccatagagatagtctctgcacttttatttccattatgctaatgccttactgaattatgaagcatttcttaagtatccaactttagctagattaatggtttattattttctacatcttcaatatataaaagcgtattatcaatggcgtagtaactgcgtttgttatgattaacatcagtaacccaccggaaaacgcccgcgcctgccagtgttgaacagtattcccgaaatgtagattttccgcaaatatgaagcaatgcggcctcttttattttagcagggttcttggtcgtactaacttttaacaggttcctggttcctcttaataacaaaaccgtatcatcgtgagtaataattctgatgttatccgtagccagataataaatgtaatgtgcaatacggtgatgttttaattctgaataaaaccaggagaagttttgctcttttctcacttgctcaaacatcttttgaaaaacaacgacctgatccatcaggataataacctcttgttagttgtgagactgcgtagtgtgcacgatcggttttaccacttcaatctggtctgtcctttggctgtgatatgtacagagtgtgatagagggaatatctgaattctcccggtgagcattttgcaacggaccagctccggtacaaacgctgttgtgggttcagattataacattctgtctaaggggcgggataaaggtgaaattagggggcatgaaagatgactttataaccttgctcaccccagtgttgtaaaagttcgttttgccttctcgttggtgccatgcctgtccagacaatcaatgtttgcgtcgggaacagttccgggcgcggcgattcaatgggatcagcaagaacagaaatgtgccatcctgacaatgataaacgccatgcttccagccacaatcgtgctctctcttcaacattccacgccatcagaatggcttctttaccgggcttacggcgcatttcgaaaagcgaggttgctgcgtattcaattaatgcgccgtcaaacatactgctcataatgcgggaggtgttgtgatcaagcacgagacgctggcgaacaggaaggtaaacatgattaatcaattgatctactgggtactctcgacccagtgaaataattctcgcgcgtagtttggcaggattagccatgcgaagaattgacatcatctcttcttgcaggcggctccagtcatcttccgtatcctggctggtggtttccagtaatgctttaactttgcctacagggacgccattacttatccaacgcttgatctcttcgatgcgttgtatgtcttcttcatcaaagagtcggtgtccgccttcactgcgctgtggttttaacaaaccgtagcggcgttgccaggcccggagagtgacaggattaatcccgcaacgttcagcaacatcaccaatgctgtaataagccacaattcctccttgcggtcacaaatctccgtcgcctgtacacgacccaataatactttgtacaatatacgctaaaattgtacaaagtataaataagatttcagctaaattggatgaaacattatttttaatgtggattaaatttaaacgtaacgtattcattttcacgatgatttactgaaatcatgtgaaagaatgtgctgaaaattattttttctctggccacgctatggaagggataccattcaatttagctttagcaaacagatctccctgaaacatctcaattcctgcggattcaagccacatccactcttctggtgttgccacgcccatagcactgacttgaatttcaagtgatgtacagcattttatgatcgcctgaataattgcctgccgtggcccacttttatgaacattggtaatcaattcctgactgattttaattctgtcaggctggaagcgtgacaggagtaacaaaccagcaaaacctgcgccaaaatgatcaattgctacactgataccagcagcctttagcgatttaatcgcttcggcaaactcatcaaaccgagatatgacttcactttcagtaaattcaacgatgatttgttcaggcaccagagcattggcctttatttcattaagtaaaaaagagactgcgtcaggttcgttaaccagggtcataggtaatagattgattgaaatcattttatcaccgagctcaagtgcgtgtgccatcgtgaatgcaagcgccttacttttgagatccgctgtgtagatttccccgtctttacgctgcccaaccgctatggctgatgggctatcttcatttttttgcacaatggcttcaaaagcgattatccgccgcgataagggatcgacaataggatgaaaggcaaagtggtcgtttatagttggtgaaagggcacaggaatcaagttctttatcagatccgtcagcgataaaaagccaggagtcttcggcagggatctcgaaataggttgattgttcggttgcaaggacaaaagtacgaaaaaattgtagcgctctgtcatcataagttagctgaaattttgatgtgcctttgtcgaatacggcctgtaaaacgtcatctcgctcgtgcaggcgcaaatcaaataattccattcccgctttgccaaaacggcgagcaggcgcgtaatcgcacagcagctcaacaatattatagtgccgtggatcctggcatatagcccgatatatcattttaacctgttcttccggaccttccagaagctggaaaaaatgagaaccattaaacagtaagatccctgttacgtcagactgcatgttcctgcgatttgctatcgaaaccatttcttcgatttttttgacaggttcgtcgtcacgtatatggctacgataaataagggtggtaagcattaacaatccagggtaatgggtgaggcgagagtaagacggtaacagacatatcttcttgtgtctttcttttaataccaaaacataaccgtttctttacattgataaaaaatggaaaaagttgaacactagttggcgaaaaatcttgtatagattgtcagttaaatgatgcaatatgttttatcataacacattgttttatatgcattagcactaattgcaaaaaattaatttatcattctgtacacatatttcgtacaagtttgctattgttacttcacttaacattgattaacatttttaacagaggcgtagcatgcatcaaaattcagtgactttagattctgcgggagcaatcactcgttactttgcaaaagctaacttgcatactcagcaggaaactctcggggaaattgtgactgagattttgaaagatggacgtaatctgagtcgaaagtcgctttgtgccaaacttctttgccgactggaacacgcgactggggaagaggaacagaaacattataatgcactaattgggttgctttttgaataatgcaacagcctgattatttaacaggttagctatgaagtcgttatgaagacatctgataatgaacgtataaaatatgaaattactggccaggcggtgctccagatactgcgcatgaagataaatttttcattgcagactcttattaagcaattactcgtaatgaaatcggctgaggaagatgctttccgacgcgatttaattgacagcataattcgtgattttagcaatagtgattcaggagggccaaaccgaagaacagcgacagctgacaataaaagtatgttcaatggtaagaaaataaacagaatacattaaaatttcataagtaagatgagaggttaccatgcttgaagatactacaattcataatgcaataactgataaagcgttagcaagttactttcgcagttcgggtaatttgttagaagaagaatcagcagtgttagggcaggctgtcaccaatttaatgctttcaggcgataatgttaataataaaaatattatcttaagtctgatacactccttggaaacaacaagtgatattctcaaagctgatgtgattagaaaaacactggaaatcgtgttgcgatacacagctgatgatatgtaacttctaattattaagtataagtttatagaaaactcattcatcttatttttgtctgtcgctttagactatacacagcataattttattgggttaatatttctacgaggctgacatgaataattcaatcccagagagatttatttttcaatgtgctttgtttaaaaatctcgagagggaggtgttcatgacgcatgggtatgttgatagtcatattattgatcaggctttacgcttgcgtttaaaagatgaaaccagtgtgattctttctgatctctatctgcaaatattgcagtacattgaaatgcataagactacactaacggatatcattattaatgacagggaatccgtgctctcttagaacttgagtaaggttttagaataaacatcagctgtatcaccatgctgatgcaaagtgagcatttcaggcgttatgctttcttattatgtccgcaatatcaggtgtcaagaatggagagttctcgctctccattcttgacgcctgatatcccgcctaacttattttgtactgcctacattatgctcaataattaatgggttagatcaagatggagaaaattttatcttcggcgtggatatttcttatgctctctaccatgctctctgtagatgccagcgcgagcgaatgaatggcattttcatgtattaaaccctttggccgggacaagcaaatgcgcaatacactcatacccatcctcgttgcgatatgcttgtttattaccggtgtcgctattttgaacatccagctctggtattccgcaaaagcagagtacctggcgggagcgagatatgccgccaacaatatcaatcatatacttgaagaagcgtcacaagcgactcaaacagcggttaacattgccgggaaggaatgcaacctcgaggagcaatatcagcttggcactgaagcagctctgaaacctcacctgcgcacaatcatcattctcaaacagggaatagtctggtgtacatccctgcctgggaatcgggtcctgttgtctcgtattcctgttttcccggacagtaatttactgttggctccagcaatcgacaccgttaatagattacctatcctgctctatcagaaccaatttgcagatacgcgcattttggttacgataagcgatcagcatattcgtggggcacttaatgtacccttgaaaggggtaaggtatgtattacgcgtggcggatgacattattggaccaacgggtgatgtgatgacgcttaatggacattatccctataccgagaaggttcactccacaaaatatcatttcactattatctttaacccgccgccactctttagcttctacagacttatcgataaaggctttgggattttaatatttattctgttaatcgcctgcgccgctgccttcctgcttgatagatatttcaataaaagcgcaacgcctgaagagatcctgcgacgggcaataaataatggggagatcgtccctttttaccaacctgtggtaaatggtcgggaagggacattgcggggagttgaggtgttagcccgctggaaacaacctcacggtggatatatatcacccgcggcatttattccacttgctgaaaaatccggattaatcgttccgcttacgcaaagcctgatgaatcaggttgccagacagatgaacgctatcgcgagtaaattgccggaaggttttcatattggaattaattttagcgcttcgcatattatttcgccgacgtttgtcgacgagtgtttaaatttccgtgacagttttacccgccgcgatttaaaccttgttctggaagtcaccgagcgtgagccattgaatgttgatgaaagtctggttcagcggttgaacatactgcatgaaaatggttttgtcatcgcactggatgatttcggtactggctactcagggctttcttatcttcatgacctgcatattgattatatcaaaattgatcacagtttcgttggccgcgtaaacgcagacccagaatcaacccgaattctggattgtgtattggatctggcgcgtaaactttcgatcagtatcgtcgctgaaggtgtcgaaacgaaagaacaacttgactatctgaaccaaaattatatcacatttcagcagggttattatttctataaacctgttacatacatcgacctggtcaaaattatcctttctaaaccgaaggtgaaggttgtggttgagtgaaaattgatcagtaaggccatagtgcggtgtaattatagacagctaattagctcgttgcctcttgttactattgttcattattttgtttgctataattgtttgaaagttttgacaggattgccattagtagcatgaacaatagtaataatctggattatttcactctctatatcatattttccattgcatttatgctgatcaccctcctggtcatccttattgcaaaacccagtaccgggctgggagaagtgcttgtgacgataaatttgcttaatgcccttgtttggctggcgatcaatctggttaatcgattaagagaaagactcgtcaaccacagggatcagcaataatctttcagtttctcactgtcagtatgcggctgaatgggttgctggcagtgaacgcctggatcattgaaggaaaggcattattgcgcaaatagttgtcaaccctggtgttatcacggttgtttttatatatcaccgaaataatcctcatcgcaactattaacaattttgatgtcgaagagttatttgttaaacaaaatcgtcacctcaaagtgatcaatgtcatgaaaataaggtgaaaaatgataatgccgacttatttatcatttatatattgtcgctgtttatctatttaaattttttgtgcttttgtttttgtctttaccctccgttttggtaatctgagctcataggttatttgaccaggaatgtttgttaatccaatgaatggatggttaatctatgaaactgaaaaaactccccgggtttagtttgggacttattgctctggcggtgggtaatgcatatgcaacacaattgttggatgattatagtataatttcctatatgactgatgaagaatcgccgattgaaatcaaagataataatccgataagtaatggagagtatctaaccactgaagacgaaagccatgctgtgaaagtggatgacggtgtaactggatatataaataatgccagtgtgatgactagtggtgatggatcttatggtatttctgttgatagtcaaaacaaagtattatatataagcgatagcgatattaagacctctggaagcgtatctgacaaagaaaatggagggataacagccagcgcagtagtcagtgaatttggtggcaccatctttatgaatggtgataattcagtcgagtcgggtggggcatattcagcgggacttttaagccaggttaatgattctgaaaagatggtaaataacacccgtcttgaaaccacagataaaacgaacattgttacctctggggaaaatgcagtaggtgttcttgcatgttcaagtcctggagagtctcgaacatgtgtcgatgctgtagatgatgaagttagtgattctaacagttacgaagttattagccgtgctgatttaaaaatgaatggtggttccataacaactaatggcattaatagctatggtgcttatgctaatgggaaaaaagcatatattaatttagattatgtggcacttgaaactgtggctgatggaagttatgcagttgctattcgacaaggtaacattgatataaaaaatagttctattacaacaacaggcactaaagcccccattgcaaaaatatacaatggtggagagttatttttttccaatgtcaccgcggtatcaaaacaagataaaggaatatcaattgatgcatcaaatatcgattctcaagccaaaatagcactattaagtgttgaactttcaagtgctttggatagtattgatgttaacaaaactacaacggatgtaagtatccttaatcgaagtattatcacacctggtaataatgttctggttaataatactggaggtgacttaaacataatttcgtccgactctattctaaatggagcgactaaactcgtcagcggcacaaccacgctgaagctttcagaaaatacaatctggaatatgaaagatgactccgttgttacccatctgactaattcagacagtattatcaatctttcgtatgatgatggtcaaacatttacccaaggaaaaacattaaccgtaaaaggtaattatgtcggtaataatggtcagcttaatatccgcaccgtattaggtgatgataaatcggctacggacagacttattgttgagggtaatacttcgggttcaactaccgtctatgtgaaaaatgctggaggaagcggcgcggccacgctaaacgggatcgaactcataactgtgaatggcgatgaatctccagcagatgccttcagataaggtgatgcaaggattgcagctggagctttcgaatatcaactaaaacaacaaggcaaaaactggtatttgacaagttatcagtcagtgaatgaggaggataacagctcagagggaaattcagaatcaacagaaacgcctacccccgtcctgcgccccgaagctggaagttacgtcgctaacctggcagctgctaacactctttttgttatgcgtctgaacgaccgtgcgggtgaaacgcgctacatcgatcctgtaactgaacaggagcgttcaagccgactttggctacgtcaaattggcgggcataatgcctggcgtgacagcaacggacagttgagaacgacctcgcatcgctacgtctcgcagttagggggcgatctgttaaccggtggttttaccgatagtgacagttggcgtttgggagtgatggctggttatgcccgcgactacaacttaactcattccagcgtgtcggattatcgttcgaaagggagtgtcagaggctatagcgcagggctgtatgccacctggtttgccgatgacatcagtaaaaaaggcgcatacattgactcctgggcgcaatatagctggtttaaaaactcggtgaaaggggatgaattagcctatgaatcctatagcgcgaaaggtgcaaccgtctcgctggaagcgggttacggttttgccctgaataaatcctttggtctggaagcggcgaaatatacgtggatcttccagccacaggcacaggctatctggatgggcgtcgatcataatgcgcacacggaagccaatggctcacgtattgagaatgacgcaaataacaacatccagacccgactcggcttccgcacctttattcgtactcaggagaaaaacagcggtccgcacggtgacgactttgaaccttttgttgaaatgaactggatccataacagtaaagattttgctgtctcaatgaacggtgtgaaagtcgaacaagatggggcgagtaatttgggggaaattaaacttggcgtaaatggcaacctgaatccagcggccagcgtctggggaatgtgggcgtgcagctgggtgataatggctacaatgacaccgcagtgatggtgggcctgaaatataagttctgatcccgccgttagctaaaaaaccgcgtcgtattcatcgacgcggtacatatgaaatattattttttgccgatagcacgcatggtgtcatcaattgccgtgatcaacagcatttgcgggtctttagcgcaaacctgattcagtttttctaccactttggcgctcagttccggagattgctcaatttttaaatcacggctggcaacgctggcattacccattaccgcaacaatttctgcaacctgtgcgctgtcagtttttgccatttcgttggcttctgcgcaagtaatataggtttctgacggcaaaccgtttttaatattgtagtcctgcgcccaggtcattggtgcgaaaacaaacaggcccgccagtaaagcaaattttttcatcatcattccttatttcattttacccagaattgcaccacccgtaccgccaatcacggcacctttaatcgccccttcgaggccattgccggtcagaacgccagtgacagcaccaacggcggcacccacttttgcacctttacgcgcatttttaccgtcgcggcctttttctgttactgcaccaacaccagcgccaacagctgcacctttcagtacgccattaacaccattgccagtaagtaaaccaacgcctgcgcctagcaatgcacctttcgtggtgcggttcatatccgccatcgctggcgtggagcagaacaatgctgagataagcccgaaggcaagtatttttttcttcaacttagatgtccggtattaagtaagttgcacacacaataatttcgtcttcaattaagatctgcttaactaaagaacgctcgctattattcagataattcaaaatgagcgtggctgtgatgataggaattatgttttttacgtgaatgagaataatcttaaatgaggaataactcattgattgacaatatttttattcaagaagtgtcattgactgttaacgcaatgttgtaaaggtaagataatctgatttatcaatattattgtgtgatttttatgtgagcagaagatattcatcagcaacgattacattagtcattttattttgccgacggcctcattgtcgaaagataagcgtacgacagtattatcagaaaagagtgattttttatccaactacacttcagcgcactgcgtgtaaaaaatgcctctttcttatgcgggatatcatcatttcatcatgatgtctttggtgagcggtgaacacaatacacctgcgctgtctcttcaggatgaatcccctggtctggtgcctgcgggctgatgttgcagcagagcttaggtcacttagacgctactatcatttatccaatggcatggaatcgaaatcagtcgatacccgcagtatatatcgtgaactgggtgcaacgctgagttacaacatgcgcctggggaacggtatggaaatgaaccctggctgaaggcggctgtgcgcaaagaatttgtcgatgataaccgggtgaaggtgaataatgacggtaatttcgtcaatgatttgtcgggcagacgtggaatataccaggcagctattaaagcctcattcagcagtacgtttagcggacatctcggggtggggtatagccatggtgccggtgtggaatccccgtggaacgcggtggctggtgtgaactggtcgttctgaccatcaacgattaaactgcgcttcggcgcagttttcgtttacaggatgttgaaagggaaaattctggggcaaaaaaagcccgccagttacggcgggaaacctcatcctatgggagaacaatgaataatgaaattgcggggttatcatctcccagtatatccatactaacaataaggttatttactcaaccaggcataaacattttgttttgtgcgtgggaacagccttaaggtgtaaagggggaggtggaaatagcaatgaggagtatcagcaagaatactcgccgctttaccacaacgtggatgagagggatgaaaaactcaaggcagagataactctgccttgaagataaatgcgcttttacagcgggcttatttcagctcttctgcttccggtaaggtcacgttcagctcaagaatagaaatatcgccatctttttgctcaagctgtacggttaccatctcaggatcaatttgtacgtatttacaaatgacctcaagaatatctttacgcaactgcggcagataatgcggttctgcatcgctgcgacggcgttcagcaacaataatctgcagccgttcttttgcaatgttggctgtgtttttcttccgcgagagaaagaaatcgagtaatgccataacttatcctccgaacaagcgtttgaggaagcctttcttctcttcttcaatgaagcggaaaggacgttcttctcccaacagacgttctacggtatctgcgtaggctttacccgcatcggcgttaatgtcgagaatgaccggttcaccctggttagaggcgcgcaatactgattgatcctctgggatcacgccgacgagtttgatgcgcaggatctccagcacatcttccatgctcagcatgtcacctctgcttacgcggcctgggttatagcgcgttaacagcaggtgctctttaataggctcttcgccattttctgcgcggcgtgatttcgacgccagaatgcctaaaatacggtcagagtcgcgtactgaggagacttccgggttggtggtaataatggcttcgtctgcaaaatagagtgccattaacgcaccggtttcaatccctgccggggagtcacaaacgataaattcaaaatccatcgctttcagatcatcaagaactttggcgaccccttcacgggtgagggcatctttatcgcgtgtttgcgatgccggcagaatatagagattttcagtacgcttatctttaattaacgcctgatttagcgttgcatcgccctgaatgacgttgacgaaatcgtaaacgacccggcgttcacaacccataatcaggtcgagattacgcaggccgatatcaaaatctatcacgacagttttctttcccttctgggccaaaccagtggcgatggccgcgctggaggttgtcttaccaacaccccctttgcccgaagtaacaacaataatgcgtgccatagaaattccttgttaaaaagggatcaatttaacggttgaacggtcaaagcgttttcgactaactgcagtcgcgccgctttgccataaaattctgctgggatttgatcactcagccagtattcacctgcgatggacaccagttccgccatcaggttcgtacaaaatatttgcgtttcccggtcaccacttgcccctgccagcgcacgaccgcgcatcatgccatagacatgaatgttcccatcggcaatcaattcggccccagcgctaacgtggcttgtaacaatcagatcacattgtggagcataaatacgctgaccggaacgcaccggggtatctattaaacgcgtttttgtgaccggcgttgtattttgcgctggagcctgcggtgtgggagctggacgtggcgctttttcctttccttccgtcaggataggcagccccatcttttcaatttcggctttaagttgcgcatctttgcagccacttacgccaataacccgcaaaccggttgccgaaaccgccttatgcatcgctgaccagtttaccgggtcttccagtgcactgacgttgagtacaacgggggcatgttttaaaaatgcgggggcctgagcgattttgtcttccagcgcctgatggataaccttaggttctgcctcatgcagatgaaccacagataaagtgaagctactgcctttaagctcgattggcgtgtttgacatcctggccttactcaattagctattaatcatcgccagcgcgcgatgatgttccgaagactataaggcatgttatagtctggattatattgaggcaagtcaccctcccatttattcagagtaaaagtctattctgtgataaatggcgctgattcatagcttaaaaaatacccttgtcaatcaacccattgccgtcgtacttttgattgttcttatttacgcttcctttttccgcaccctaatcgtgacagcatctccagacctgtttaaatatccagtattgaggcaagtgtattttttcaccacgccaggctttcttaactttccattttttgcggcatcattaaagaacagatacccgttatcttaatatccgccacagaattgctctatcatagaaaccgcagaagacgtctgatacttctgtcaggtcatcgtaactcgtccaggtcagcggttttgattacggattgatgatgaaatgagcataagtgttgtacggttggattatcaggatgtgctatgaatatgatgcgtattttttatatcggattgtcaggtgtggggatgatgttctcatcaatggcgtctggaaatgacgctggcggacttcaatctccggcgtgcggcgttgtttgcgacccgtatatttgtgtgaactcagatggcatttccccagagttaacaaggaaatatctcggcgaaaaagccgctgaaaacttacaatcattacaaggctacgatcccagcgaatttacattcgctaacggtgtattttgcgatgttaaagaaaaattatgtcgtgatgatcgttattttggtgtggatggtaagcggagtggaaaaatcaatcaaaccaccacaaagatgttatttatgtgtcgtgagtgatgtcttgtttacattatgttctattcgtcattaacctcttgagcgacagagaggagtggggcattaacgtttatgacggggagagtccccgtcggttgacatttacttaatttgaatatcgacgttatattttttagttttgtttttacgggcgtcgtttcgggtttgcaacactcgcagctcatatttgccagaagcagggagtgagtattgtccgtgactatcgagttctggggaatatctggataaatcaactgaatcatcgattcctggcccgaagaggtaagtatcagcgccttcattagagatactcacatgcactttctgaccttttttggcatagaaggtatatgtatcgtaatcgtatccctttatttcgccggagtactgagcgctgctatggccttttctgaactcaacattgacattcttacccgcagcaaagctcgtggaggttagcagtgcaagcagcaatacagccttcctgatgctcttgattttcattggtagtctcctgttcagaatgagtacgatgaactgttataatataacaatccctaacgggagaattccagtggctttcctgcgttcggtaaaatcacgttgcggcatttttgccggggggattacttataaagggggcatggactcaacaaaccgtagaaatctacagctggctggcttgtggcgcgggtttcattgatgttagcttatgccaaaacctggcatcttaaagagtaaaagtatgttttgtgtgatttatcgaagcagcaagcgtgaccagacctatttatatgtcgaaaaaaaagacgatttttcgcgtgttcctgaggaactgatgaaaggttttggtcagcctcagttagcgatgattctgccgctggatgggcggaagaaactggtcaatgccgatattgaaaaggttaaacaggcattaaccgagcaaggttactatttgcagttaccgccaccacccgaagatttgctgaagcaacatctttccgtcatggggcagaaaacagacgacactaacaaataaccgatatccggcggtggcattatctttgtcggcgcgggttttcatatccacgataaggtgaggggaacgttatgtatcaacatcacaactggcaaggtgcgctgctggattatccggtgagtaaagtagtctgtgttggcagtaactatgccaaacatattaaagagatgggcagcgcagtgcccgaagagccagtgctgtttattaaaccagaaacggcactgtgcgatctgcggcagccattggcgatcccatccgatttcggttcagttcatcatgaagtcgaactggcggtgttgattggcgcgacactgcgtcaggctacggaagagcatgtccgcaaagccattgccggttatggcgtggcgctcgatctgacattgcgtgatgttcagggaaaaatgaagaaagccgggcagccgtgggaaaaggctaaagcgtttgataactcttgtccgctttccgggtttattcccgcggcggaatttaccggcgacccgcaaaatacaacgctgagcctgagcgtaaacggcgaacaacgccagcaaggtacgactgcggacatgatccataaaatcgttccgctgatcgcttatatgagcaagttttttaccctcaaggccggtgacgttgtgttgacaggcacgcctgatggcgtcggcccgttgcaaagcggtgatgagctgacagtcactttcgatgggcattctttgacaactcgcgttttgtaatactttttgccgcctgaaagcggcggcaaaacttgcatcgctgtgccagactggttataaggtgcgttttaacgtaatggcggaacacctgatgagcgatgtacctttctggcaaagtaaaaccctggacgaaatgagcgatgcggaatgggagtcgttgtgtgatggttgcggtcagtgttgcctgcataaactgatggatgaagacaccgacgaaatctacttcactaacgtcgcctgtcgccagctcaatattaaaacctgtcaatgtcggaactacgaacgtcgtttcgagtttgaacccgactgcattaaattaacccgtgaaaatctgccaacattcgaatggctgccaatgacctgcgcttatcgtttgctggcggaaggtaaagatttacctgcgtggcatccgctacttactggttcgaaagcggcaatgcatggtgaacgtatctctgtgcgtcatatcgcagtgaaagaatcagaagtgattgactggcaggatcatatcttaaataaacctgactgggcgcagtgataaatttaatagatgctgatgggggctttcttaatatacgtctggatgctcgccatttcgtagccctgtttttgaaagcgctctgtcataatgagagttacccgataccttattatcaacaggtaactctcaatctttaaaaaacgtctgtgtttttaaatgtgataaaccttataccttgagtacatggagagaataatcgcttatcagacttcaggtacctcaaagagtgtctttttaccgtgtcttttctgatactcattacaggtgttaatcatttttttggccgcttcttttagcaaagaaagcattaaatcatcataatcaacgtagaatctggttgtttcagtttccgtttttatctcaccgatggcggctatttcggtggttaatttcaatttggcggcatcgatatctttattcgcttgtttaaccgtgttagacagggtggtaaagaaattctgcacagattttaacttgttcttcaattctggaatcagttttccttcaactacgcccgcagcaatagaataggaaatgattaatccaaatggaccggcgacgacaccggctgcggcaccggcatatgcttccttcctgattttatctacctgtgactggaaatagctgcttttttctgaaaaatcattggttaactggctatctaacgccagcagtttcccggaagcgttgttgaaactttgtgagcttaccagcagggatttttgcgcttcattcagcttcgtgatgccgtcatccagtaccttaatgagaatgtctttctgggcggatgctttcttctcattgtactcatcaaatagcaaaatatacgctgcgagcaattgcgtcgcaacaccacaccattcatacactgtttgggttgcttcaaaatacttatcctggctatccataagtaaggttttaatatcgccgactaaaacggaggctgcctgtgaatactcctgtttaaagcgacttaactcttttatggtttcatcaaaggtctgccaggggatgacctgatcgagatatttattataaagatctaatgctccatctgcggtttcgattgcgtttttaactacttctaccgttttatctgcaacgatttcagtcataatcattcgcctctttaaatatataaattgtaatgaaactcctgttttacaactattaataaattttacttcatctaattcatagttagccgggcgggatgcgtcaatgtctttatttctattaatatgataaatatcaaacaatgtttaatgtcattatggcgaatgcttctattctattttttagccgggtgatatttttcatttctgctggatgagcgtcgtcgccagaaggccacgtgagcacaagataagagaacgaaaaatcagcagcctatgcagcgacaaatattgatagcctgaatcagtattgatctgctggcaagaacagactactgtatataaaaacagtataacttcaggcagattattatgttgtttatcaagcctgcggatctccgcgaaattgtgacttttccgctatttagcgatcttgttcagtgtggctttccttcaccggcagcagattacgttgaacagcgcatcgatctgaatcaactgttgatccagcatcccagcgcgacttacttcgtcaaagcaagtggtgattctatgattgatggtggaattagtgacggtgatttactgattgtcgatagcgctattaccgccagccatggtgatattgtcatcgctgctgttgacggcgagtttacggtgaaaaaattgcaactacgcccgacggtacagcttattcccatgaacagcgcgtactcgcccattaccatcagtagtgaagatacgctggatgtctttggtgtggtgatccacgtcgttaaggcgatgcgctgatgtttgccctctgtgatgtaaacgcgttttatgccagctgtgagacggtgtttcgccctgatttatggggtaaaccggtggttgtgctatcgaataatgacggttgcgttatcgcccgaaacgctgaggcaaaggcgcttggcgttaaaatgggcgatccctggttcaaacaaaaagatctgtttcgtcgctgtggcgtggtttgctttagcagcaattatgagctttacgcagacatgagcaatcgggtgatgtcgacgctggaagagctatcgccccgcgtcgagatttacagtattgatgaggcattctgcgatctgacaggtgtgcgtaattgtcgcgatctgactgattttggcagagaaattcgcgcaacggtgctacaacgtacccatcttactgttggtgtggggatcgcccagaccaaaacgctggctaagcttgccaatcatgcggcaaaaaaatggcagcggcagacgggtggggtggtggatttatcaaatctggaacgccagcgtaaattaatgtctgctctccccgtggatgacgtctgggggattggacggcggatcagcaaaaaactggacgcgatggggatcaaaaccgttctcgatttggcggatacagatatccggtttatccgtaaacattttaatgtcgtgctcgaaagaacggtgcgtgaactgcgcggcgaaccctgtttgcaactggaagagtttgcaccgacgaagcaggaaattatctgttcccgctcgtttggtgaacgcatcacggattatccgtcgatgcggcaggccatttgtagttacgctgcccgggcggcggaaaaacttcgcagcgagcatcaatattgtcggtttatctccacgtttattaagacgtcaccatttgcgctcaatgaaccttattacggcaatagcgcgtcggtaaaactgctgacgcccactcaggacagcagggatatcattaacgctgctacgcgatctctggatgccatctggcaagcgggccatcgttaccaaaaagcgggcgtgatgctgggggatttcttcagtcagggagtcgcgcagctcaatttattcgatgacaacgcaccgcgccccgggagtgagcaattgatgacggtaatggatacactgaatgctaaagagggcagaggaacactctattttgccgggcaggggatccagcaacaatggcagatgaagcgagccatgctttcaccacgttatacaacgcgaagttctgatttactgagggtcaaataaatatagcggcaggaaaaaagcgctcccgcaggagcgccgaatggattagcgaccgaacagatcacgttttttcgctttaaacggctgggaaatcaccaccagcactgcgacaatcaggtaagcgataaaaataccgagcagccactgcggcatttccagacctaaaaaatcccactgacgctcggcgcaatcgccagaggcgacaaacacttgcggcacccacttatccagcggcagccattccgggaaacgaaccataaaatcacaggtggcaaacggcgaaggatagagctgaagcatggtgtgctcgtaagttaactgcacaccgcggaacgcactatacaaccagataaccatcgctacataacgcagcggagttttcggggcgatcgcgccaatcagcgcagcacccagaacgccgaataacgcgcagcgttcataaatacagagcacgcaaggtttcagtaacatcacatgctggaaccacagcgccgtcagttccagtgccagagcagtaaacgccatcaacagccacgcgccccggccttgtgaacattggttcaaaaatcgcaacataatcatttccctgcaatatgcatagagtgcgcagtttaaaccaattcattcgctgcgccaccaggaggcagcaaaaataggacgcaattggacaattatcgggcgaaaaggcaaaccgggcatttatatgcccggtaagttgttatcaaagcgttgctatccagcccatttgcataaaccattcggttacaggggcaagcgtaaactcgacgcagagcaagccgacgagtgtcaggacgagggtgtaaggcagggccatccacaccatgcggccataagagaggcgaatcaatggcgcgagtgcagaggtcagcaggaacaggaacgcagcctgaccgttcggcgtagcgacggagggcagattggtaccggtattaatggcgaccgccagcagctcgtattgcttcaacgtgatagcgccactttccattgccgctttcgcttcgttgatataaatcgtccccacgaagacgttatccgaaatggatgacagcagaccgttgaaaatatagaacagcgacagctgagcatgttccgatgcctgcaacacaaactgaataattggcgaaaacagttgttggtcgataatcaccgcgactaccgagaaaaacaccgtcaacagtgcggtgaatggcagagattcggtgaaggctttaccgatagcatgctcatcggtgacaccggtcaatgatgttgccagaataatgactgacaaaccaatcaagccaacttccgccagatgcaacgccagcgcagtcaccagccagacgccaataatcgcctggacaatcagacggattttatcctgacgggtacgctggtggcggctttgatcgtcaaactgttgcaacacttcgcggactttctccggcagcgtttcaccgtagccaaaccaacgcagcttctctaccagcaggcaggttaacaggccacaaatcagaaccggaacggtcaccggcgacatgcgcaggaagaaatcgccaaaatgccagccagccgctttagcgatgatcaggttctgtggttcgcccaccatggtcattacgccgcctaatgcggtgccgacaccggcatgcatcatcaggctacgcagaaagccacggaactgttccagaaccactttgtaatgcttgtcgatatgactatcgtcttgcaggtcggtgtcttcggtacgggaagaggctacgcggtgataaataccataaaaaccgactgcaacgctgatcaccaccgccacgacggttaaggcatcgaggaacgcggagaggaacgcagccgccacgcaaaaagagagcgacagcagcattttggagcgaatgcttaacagcaaacgggtaaatatgaacagcaacagctgtttcataaaatagatacccgccaccataaacatcagtaacagcaagacttcaagatttgccgccacctcttcacggacgtgttccgcgctggtcatgccgatgaataccgcttcgatagccaacagaccaccggggagcagcgggtagcatttcagggccatcgccagagtgaaaataaattccgctaccagcaaccagcccgcgacgaaagggctgatgaggaaaattaacgggtttacgattaagaaaatgatgagggcgagtttgtaccagtcgggggactggcccaaaaaattgcgccatagcgcgcggccccaggagatctccatgatggtttcccttaccttacaaataatcaatgatgtttttatgtttaaacgcaaagcttaacggtcaggcaggagtgaggcaagtcttgatagtcaaggggaaagagatgcggaaaatgaagccttgatccctttttcttctttttgtctgctatcagcgtagttagccctctggtatgatgagtccaactttgttttgctgtgttatggaaatctcactatggtcattaaggcgcaaagcccggcgggtttcgcggaagagtacattattgaaagtatctggaataaccgcttccctcccgggactattttgcccgcagaacgtgaactttcagaattaattggcgtaacgcgtactacgttacgtgaagtgttacagcgtctggcacgagatggctggttgaccattcaacatggcaagccgacgaaggtgaataatttctgggaaacttccggtttaaatatccttgaaacactggcgcgactggatcacgaaagtgtgccgcagcttattgataatttgctgtcggtgcgtaccaatatttccactatttttattcgcaccgcgtttcgtcagcatcccgataaagcgcaggaagtgctggctaccgctaatgaagtggccgatcacgccgatgcctttgccgagctggattacaacatattccgcggcctggcgtttgcttccggcaacccgatttacggtctgattcttaacgggatgaaagggctgtatacgcgtattggtcgtcactatttcgccaatccggaagcgcgcagtctggcgctgggcttctaccacaaactgtcggcgttgtgcagtgaaggcgcgcacgatcaggtgtacgaaacagtgcgtcgctatgggcatgagagtggcgagatttggcaccggatgcagaaaaatctgccgggtgatttagccattcaggggcgataatcccttccgtttaaagagcaaacccctcaaacgaggggttttttgttgtttttacagatttcccattcttggcgggcaacgttccagcaactcgatgctgccgtcttcgttttgctgttcgagcatcacatcaaatccccacaggcgatgcacatgcttcaggacttctttgcgcccccgatccagcggtgcgcgattatgtggaatataacgcagcgtcagcgaacggtcgccgcgcaaatccacgttccagatctgaatattcggctccagattacttaagttatattgcgacgataaccggttacggatctcccgataaccttcttcattatgaatagcggaaatctccagataattatgccgatcgtcatccagcacggtgaagaagcggaaatcacgcatcactttcggtgacaggaactggctgataaaactctcatctttgaaatcacgcatcgcgaaatgcagcgtttccagccagtcggaaccggcgatatccgggaaccagtatttgtcttcttccgttggcgactgacaaatccgtttaatatcctggaacatggcgaacccgagggcatacgggttgatgccgctgtaccacgggctgttataggggggctggaagaccacattggtgtggctgtgcaaaaactccagcataaaacgttccgttactttcccttcatcatacagatggttaaggatggtgtagtgccagaaggtcgcccagccttcgttcatcacctgagtctgtttttgcggataaaaatactggctcaccttacgcacaatacgcaggatttcacgctgccatgattccagcagtggcgcatttttctccataaaatagagcaggttttcttgtggttcggacggatagcggcgcgcttcagcaaccgttttctcttcctcgcgcttcggcagggtacgccagagcatattgacctgactttgcagatactcttcgcgacttttctgccgggctttctcttcttgcagcgagattttttgcgggcgtttgtaccggtccacgccgtagttcatcagcgcgtggcacgagtccagaagccgttctacttcatcaacgccataacgctcttcgcactcggtaatatatttacgggcaaaaatcagataatcgacaatcgaactggcgtcggtccagctacggaataagtaattgtttttgaagaaagagttatgcccatagcaggcatgagccatcaccagcgcttgcatggtaatggtgttctcttccatcaggtaagcgatacacgggttagagttaatgacgatttcataggccagtccttgctgaccgtgcttatacagccgttcagtctcgataaactttttaccgaatgaccagtgcggatagttaattggcatgccgacgctggagtaggcatccatcatctgttctgaggttatcacttcaatctggtgcgggtaggtatccagccggtagagtttcgccacccggtctatctctgccagataaacatccagcaggtcgaacgtccagtcgggtccatcgctcaaacgtgtggtgtccttattcatagaatcgatcgtcgccatacgcgcacctcattgttgtcggcgctctctgtgtggagcacctcatttcaagcatagaacacctgttaaaaaccgcgtcgccggagaatttttttctttgcgatttcttattatcagagtgccactaatccgcttctgaacggaattttatgctggataaaaagggcgttcagcaggagatactaaagacgccatattgccgcagagtcagggagatgtgagccagctcaccataaaaaagccgcatgttgaataatattttcaactgagttatcaagatgtgattagattattattcttttactgtatctaccgttatcggagtggctatgcgagttgtcatactgggaagtggtgtggtaggcgttgccagcgcctggtacttaaatcaggcaggacatgaggtcaccgtcattgatcgggagccgggggccgccctggaaaccagtgccgcgaatgccgggcaaatctcccccggatatgctgcaccgtgggcggcaccaggtgtgcctttaaaagcgattaaatggatgttccagcgccatgcgccgctggcggttcgtctcgacggtacgcagttccagttgaaatggatgtggcaaatgttacgtaactgcgacaccagccactacatggaaaacaaagggcggatggtgcgtctggcggaatacagccgtgattgcctgaaagcattgcgcgccgaaaccaatattcagtatgaagggcgtcagggtgggacgctgcaactgttccgtaccgaacaacagtatgaaaatgcgacccgcgatatcgccgtgctggaagatgccggcgtaccgtatcagctgctggaatccagccgcctggcggaagtggagcccgcgctggcagaagtggcgcacaaactgacgggcggcctgcagttacccaatgatgaaaccggagactgtcagctatttacccagaatctggcgcggatggcggagcaggcgggggttaaattccgctttaatacgcccgttgaccaactgctttgcgacggcgagcaaatctacggcgtgaagtgtggcgatgaagtgattaaggccgatgcgtatgtgatggcgtttggttcttactcgacggcgatgctcaaaggcattgttgatattccggtgtatccgctgaaaggctactcgctgaccattccaattgcgcaggaagatggtgcgccggtatccaccattcttgatgaaacctacaaaatcgccattacccgtttcgataaccgcattcgtgttggcggaatggcggagattgttggttttaataccgagctgttgcaaccgcgtcgtgaaacgctggagatggtggttcgcgatctctatccacgcggcggtcatgtcgagcaggcgactttctggactggtctgcgcccgatgacgccagacggcacgccggttgtcgggcgtacacgctttaaaaatctgtggctgaataccggtcacggcacgctcggctggacgatggcttgcggttccggtcagttgttaagcgatctgctctctggtcgcacgccagcgatcccatatgaggatctaagcgtagcgcgctacagccgtggatttacgccatcacgtccgggccatttacatggcgcacacagctaaggaaacgagatgacccgtccgatacaggccagcctcgatctgcaggcattaaaacagaatctgtccattgtccgccaggccgcgacgcacgcgcgcgtctggtcggtggtaaaagcgaacgcttacgggcatggtattgagcgtatctggagcgcgatcggggccaccgatggctttgcattgcttaacctggaagaggcaataacgttacgtgagcgcggctggaaaggaccgatcctgatgctggaaggatttttccatgctcaggatctggagatttatgaccagcaccgcctgaccacctgcgtacacagcaactggcagctcaaagcactgcaaaatgcgcggctaaaagcaccgttggatatttatcttaaagtgaacagtgggatgaatcggttgggcttccagcccgatcgcgtgcttaccgtctggcagcagttgcgggcaatggcgaatgttggcgaaatgaccctgatgtcgcattttgccgaagcggaacatcctgatggaatttccggcgcgatggcgcgtattgagcaggcggcggaggggctggagtgtcggcgttcgttgtccaattcggcggcgactctgtggcacccggaagcgcattttgactgggttcggcctggcattattttgtatggcgcttcgccgtccggtcagtggcgtgatatcgccaataccggattacgtccggtgatgacgctaagcagtgagattattggtgtccagacgctaaaagcgggcgagcgtgtgggctacggcggtcgctatactgcgcgcgatgaacagcgaatcggcattgtcgccgcagggtacgccgacggttatccgcgccacgcgcctaccggtacccctgttttagtggacggcgtgcgcaccatgacggtggggaccgtctcgatggatatgctagcggtcgatttaacgccttgcccgcaggcgggtattggtacgccggttgagctgtggggcaaggagatcaaaattgatgatgtcgccgccgctgccggaacggtgggctatgagttgatgtgcgcgctggcgctacgcgtcccggttgtgacggtgtaacttgttgtaagccggatcggaggcaacgtcttctgggtgcaaaaaaatcatccatccggctggtcagcaactgtagttgttaatgtgacagagccattgcccatgatagtgtccattaaaaggatggacactatttccccggaacctgaactcaccgcacaggcgttctacataaaacgcttacgcttcattgttgactcgaactcgacttcagataaatcacgctttacccttgatggagcctgtacatagatttgtgtaattgcctgattttgatatgttcaattcaacatcaaatgaaggttaaattatggacgacaaacaattgcaggctcaggctgcgttcagcaaagcatcgcaaccggcgatagatgcttcattaaatttaagattcagcttcctcttcagccacccgtacgccaatcttcaacacttcattatcttctttctcggccaccgtccagatcatcccggcaaactctacctggtcaccgacaaccggtgccgcgcctaacaactgctggacaatttcacccagcgtttgctgcttatcacgatattctcgcccgtcttccaggccatatatcagcgcaacatcagcatatttggcgctggcttcgagaatgaagtcaccaaagaagcgttgatccagcgcgaccggcggcgactggctgaacagtttaccgagcgccggaagatcgcgttcccgaccaattacacacaacacatcgccttcgcgcagtcgggtgctgccggtaggatgaagcaactggttatcacgaaacagtgccgcaatacgcgtctcttttggcatatgcaaatcgcgcagtgccgcgcccacgcaccatttatcggcactcaattgataaacaaactgctcccacggattttccggatgaatatccaggccaacgcgtgacaccggacgtcccactggcggaaccaccactttggcttttttagccgcccacgagagtgatgttccctgcaagagcagtgaaaccagaaccacaaagaaggcgacattaaagaacagacgtgcattctccagccccgccatcatcgggaacacggccaggatgattggcaccgcgccgcgtaatcctacccagctgataaacacgcgctcacgcagattgaaaccgcggaaggggagcaatccagcaaataccgaaaggggacgggcgaagaatatcatccatgcggacaaaatgagcgccggaatggcaataggcagcagatcgcttgggttaaccaacagccccagcaccaggaacatggcgatttgcgccagccaggcgaggccgtcgaaattttgcaggatgccgtagcggttgcgaatagggcgattacccagcagaaaaccgcacagatacaccgccagaataccgctaccttccagcgcagtagttaatgagaaaatcagaataccgccacttaatgccagcaatggatataatccggcgggcagggcgatgcggttgatcatttgcagtagtaaataaccgccgccaagacctattacaatgcccagaccaaattgttgcagaatatcgacaatgaacatccagctaatattgctctcatgatgctggatcatcgcaattagggtaatcgtcagaaagaccgccattggatcattactgccggattcaatttccagcgtcgagccaacacgttcgttaagccccttaccacccagcagagaaaagaccgctgcagcatcggtagagccgacgatagcgccgattaataagccttcaatcaaatcaagattaaacagccacgccgccatcatgccggttaaaccagaggtgataagcacgcccagcgtcgccagcgacagtgccggtcctaacgccacacgaaaggaactggcctgagtgcgcatcccgccgtcgagcaaaataatcgccagtgccaggttacttaccatgtaggcgaaggggtaattatcaaacgggataccgccgacgccatcgactcctgccagcatgccgatcgccagaaaaataaccagaataggaatgccaagacgggaagaaaatgaactaagtaatatactgctggtgacaaggatggatcctaagatgaaaaggctaattattgttgtggcatccaacggtcggttactcctgattacgctgtctcttatataaaccctaccatattagcggcagagacagcgttttacttagccctgaagcgtgatttttttacattttaagaacaggatgaccgctaatcgtcaactgagtgccttcccgggtgttattcagaatggcatgtgcgcccaacggcagcgtaaccgtgcgttgttcatgaccaaaatcgaggccggtaatgagtggaatcgacaggcgggaacgcaaaaacgcgtacactgactccaggttgtaacctgcgtcataatcattgggcgtgctgccgctaaagctaccgagaataatcgccttctgacgtggcaaaattcccgcatgatagagctgcaacagcatacgttcgacccggaaagggtgctcgttaatatcttccagcaccagaataccgttctcaatttttggcatccacggtgtaccgatcagtgaaatcagcatcgcaagattgcctccccacaacgtgccttcggcccgacatgtcgggccttccccttgccattcaatggtgaaggtttcattgcgtaacgccagccagaaatggtgctcggtaaaggcgttcagttcatccgcgccaaagtttgctaccagcatggggccgctaaaggtgatgacattgccatgcgccagaagaccgcactgaatggcggtaaaatcgctatgtccgcaaatgagcaacgggtcatgttgttggcgagccaccagtgcctgccagtcaatatctgccagtaaacgactggcaccgtaaccgccgcgtacagccagcacgatggtgttgggggtagtcagtctggcaagggaattgagatcttccagacgctctgtttccgtacccgcaaaacgctcacaacgacgggcaataacctcgacgttattgacttgatgccccgcgtcggtaaggcgctggataccacgcagcgcggcgtgctgtttaatgcagtaacccgatggggcaattaagtgaaacagagacatggcaattccttgctgacaacagaaacgaaatgtatatcatgccgcttaggtgtgccgttgtcacctcaacggcgattccaggctataaggatagaagaagtgaaattgagatggtttgcctttttgattgtgttattagcgggttgttcatcaaagcatgactatacgaacccgccgtggaacgcgaaagttccggtgcaacgtgcgatgcagtggatgccaataagccagaaagccggtgcagcctggggcgtcgatccacaattgatcacggcgattatcgctatcgaatcgggtggtaatccgaacgcggtgagtaaatcgaatgccattggtttgatgcagttaaaagcttcaacctccggacgtgatgtttatcgccgtatgggctggagtggtgagccgacgaccagcgagctgaaaaatccagagcgtaatatttcaatgggggcggcttacctgaatattctggaaaccggcccgctggcaggcattgaagatccgaaggtactgcaatatgcgctggtggtgtcatacgctaacggggcaggtgcgctgctacggactttctcgtcagatcggaaaaaggcgatcagcaaaatcaacgatttggatgctgacgagttcctcgaacacgtagcgcgaaatcaccctgcgccgcaggctccgcgctatatctacaaacttgagcaggcactggacgcgatgtaaatcagtcgcgcactttgtccgctttttcccgggcttctcgctcgagagagaaaataatccgctgtaattgccgctccaccgtcgggctgacgttaagaaaacggaagctcagacggggagtggtgatggtttcattcttgccatcaatcactttgcgctcgctgatggagattaactgggcgtcaaagtgaaaaacaccccattgccccatgttgacttcaatctgagcgaagcgcatgccttcttgtaattcggcaggctttgctgtttccagtaatgcgcccatgccgcctaacgacaaatcatacaggcggaaacgtaacgtactgttatccgccagtttggtctggcaaaaataaggcggatggagtggggcggagatgcggaaatatcggcgtcgttgtacaaaccataaggtgggaggcggtacggtaataaatgccggaagctgcaagtattcactctgctgtagttgttcaacagtaaactcgactttcgcaccctgagtttcggcggtaatggtaatgtgctgtgcctttagcacggcgatgttgtcttcggcttgactgccgaaatccagcaccagtttatccggggttattgccagtaatttgctgatcagctgcccgccattccaactgagacgcaaaggaattgcggctttgtgcaaatcgcgtaacacgcccaggacggctaacggattttgtttcaggaactgctcatggtaatgactcacgcggaaaaactcctgactgacaaactgtctttggtttatcggtcacagttaacaaaacttaatacaaatgcgtgaatattttttacatgttgttcttaaatcagccgacatacgcccagcatcgatcccgcccttgcctatacttagagcgttgatgtaagcatttcttgcgtccgattcatcgaaacgagggcctgaacatgggaattattgcctggattatttttgacctgatagccggcattatcgccaagctaatcatgccggggcgtgatggtggtggatttttcctgacctgtattctcgggatagtcggtgcggtggtcggcggctggctggcgaccatgtttggcattggcggctccatcagtggttttaatctgcacagcttcctggtggcggtggtgggagctattctcgttctgggcatattccgcctcctgcgaagagaataagattttcataaggcggatagcgatacagatgccgctatccgctttcacatcagaacgtatactcgacacctgctttacgggtgaaaaaaatcaatatagcacttcgatatccgataaagtcggttcccggtaacaacaacagaatccttttttaattattgtttcgttgtttttggtgtgattcagaaaataaatattttagacagtagccagtcaggcgttaaaaatggggcggatagtgaggcggttttggctgcgcttattgaacatttagaattgatcaatccttctggcagattaagccaaaatacccgttcggcaatgcttcagttacgcgaagaggaatggtctgaattctttttttggttgctaaattctctggagtgtctggattatgtgattattaatttaactccagaaagcaaaaaaacgttgatgagtgaacaccgtaacaatattcaggtagcaattgatgctttatatagccaacgtcggcgtaaatcgccgggtgatgaaagtgaaacacttacccgtagaaatgacgctatcttcggcaaccacgtatggcaaacatttgcgcaatacttcccgccaggacttgaaaaaccgtctgtgtagaaaaaaccatagctatggtgttatctgccgacaacgccatccggagaagccgaatgacgttgtcggagtaagcgctggttaaggtgtgggttgtgcctctttggttgagggttgcgtcgttgctgacttaacggtcggacgcgtcgccggaacattgtcacacggttgctctttcgggcagatcaaatccagcattttcagcgtcacgccattggtccagccaaagccatcctgtaatggatattcgccaccgccgccccccgttccggtggtgctgacatcatatttttccaccagctttttctcccggtcataggtgtgctgaacattggtcaggaagtgccagctaatgtccatcgccacctctttttgcccgtagttttgtaatccttctgtcgcgacccactgtaacggtgcccagccatttggcgcatcccattgttgcccacttttcaccgacgtggtgttcaggccgccgggttgcagcagatgtgttttcgtcgccgtcgccattttgttggcgcgatctttcgctgccgcattgacgtacagcgggaacagggcggccgcggttaactgattgcgcactttatgacttttcaggtcgtaatcggcataccagccttgttgatcgttccacaggtatttttcgatccctttttgacgggcatttgccagcgtttcgtactggtttgccatcgcgttatctccggcagctttgctggcgcgggcgaggattttttccattttaaacatcaggctgttcagatcgaccggtacgatgctggtggtgcgtaaggtatttaactgctgcgggttgtccatccagcgcgagctgaaatcccagccagacgcagcggcagagcgcaggtcgcggtaaatttcagtggcaggtcgattcggattgcttttggcggtggcaatatcttccacccatgactctggtcgtggcgtatcgcgatcgtcccagtagcggttgagaagggtaccatcctgaagtttgacaacgcgtttttcctgttgtccggcttgcaggttttcaacaccgtccatccagtaagcatattctttttgcatttgcggcaggtattgcttcaacgcggcatcgccttcatgctgcgccagtaactctaccatcagggcaaagaagggcggttgcgagcggcttaaatagtaactgcggttgccgttgggaatatgaccgtaagtgtctatttcatgagcaaaattggccaccatatccgcgactttatcccagtgaccgctttcggcaagtcctaacatggtgaagtaactgtcccagtaatatacctcgcgaaagcgtccgcccggcacgacataaggttccggcagcggtaacagagaatcccatttttcggtgttttcggtagaacgcgttaataccggccaaagtccgtcaatatgttcgcgcagtgactgcccctctggcggaacatatttctcgccttctttcggcagggtgaaattgacgttaacgaaatggcgcagatcaaatccgctctggttttgctgcatccgataatcagcaaggatcatcagcggatcgctgttcggcacggcatcggcaaaggttttttggtccggaaaaagtttggcgttttgcacatcattaaacagcggccctaataaaatatcaggcggctgtggtgttaccggtgtttcttctgcctgcaccgatagcgcagcgaaacacaaaaagatacaggctggaattaacgccattttttgcgggcgagaaggtgcgggggatttcatcaatcattctcctttggcgaaaccgaataaaacggtattcaagtatcagaaaaccttagggaaggtgcgaataagcggggaaattcttctcggctgactcagtcatttcatttcttcatgtttgagccgattttttctcccgtaaatgccttgaatcagcctatttagaccgtttcttcgccatttaaggcgttatccccagtttttagtgagatctctcccactgacgtatcatttggtccgcccgaaacaggttggccagcgtgaataacatcgccagttggttatcgtttttcagcaaccccttgtatctggctttcacgaagccgaactgtcgcttgatgatgcgaaatgggtgctccaccctggcccggatgctggctttcatgtattcgatgttgatggccgttttgttcttgcgtggatgctgtttcaaggttcttaccttgccggggcgctcggcgatcagccagtccacatccacctcggccagctcctcgcgctgtggcgccccttggtagccggcatcggctgagacaaattgctcctctccatgcagcagattacccagctgattgaggtcatgctcgttggccgcggtggtgaccaggctgtgggtcaggccactcttggcatcgacaccaatgtgggccttcatgccaaagtgccactgattgcctttcttggtctgatgcatctccggatcgcgttgctgctctttgttcttggtcgagctgggtgcctcaatgatggtggcatcgaccaaggtgccttgagtcatcatgacgcctgcttcggccagccagcgattgatggtcttgaacaattggcgggccagttgatgctgctccagcaggtggcggaaattcatgatggtggtgcggtccggcaaggcgctatccagggataaccgggcaaacagacgcatggaggcgatttcgtacagagcatcttccatcgcgccatcgctcaggttgtaccaatgctgcatgcagtgaatgcgtagcatggtttccagcggataaggtcgccggccattaccagccttggggtaaaacggctcgatgacttccaccatgttttgccatggcagaatctgctccatgcgggacaagaaaatctcttttctggtctgacggcgcttactgctgaattcactgtcggcgaaggtaagttgatgactcatgatgaaccctgttctatggctccagatgacaaacatgatctcatatcagggacttgttcgcaccttccttagttcaggatcgcactagctgcatgatcgaaatctcattctgcgaactgtcaggcattttagaaaagggaattaaagggataaataacggcgaaatagagtgatcaaataacgtctgtttattagccagccagcggcgttgggttcgtgattagcgaagaaaaatcatcataaattggtgaaaaatataacaggtagttaaaaaccattagtgctgagtaaattgccggatgacatcagaacgatgccatccgaacagtggcttaaccctgacggttgaaacgttgcgttttaacgtccagcgttagcgtttcttctggttgtatcgcatacagtttctcaccctgctggcaaatccagccaatccccagttcacgggcgattagggcgctgtgggataccggacttccggcgctaaggcagataccttttacaaccgccggatccagttgcagtactgtggaaggataaatgttctccgccagtagaatagttggcgagttaaactgcgggagttcttctttcgtttgggtcaggtggaccagggtgcgatgcagaagatcgtccacatcaatatagcgagcttgtagatattcatcatccagttgctggtattgctggctaagttctttaagaacttgctgccaggcatattctgccgtgcaatgttcatgctgaaggagttcgcttgccgccgccagcagttccggatcatctaacagtgtatggtgaccagaaaagattgcggcaatatcgtcaagcccgctggcttctgctttcgctgttaacgtcatcagatctaataacgtgaagtcaatagcctggcgtaatcgatcttgttcttcttccacggtcagggttgattttgcctgtaccgtacataaaactggttgataataaaaggctttacccgaaacaggcggaacgggacgcagagtaggtggagcgacttcctccgtttcaccaaagttatcttcagccagctgacggaaagcgatcagtgcctcttcagcttctggccctttcgcaatcaggcgcagcgtatcgttatagcgaacttgtagtaacgcaatctggttaatactctctggtgtgacgcatttgccgtttttttccagcaacatatcggcattaaatgtcgataaggtataaaccagccgggaggccggacgtacatgcaggccgttacggttttttatgaccaccgccagagaacgggcttcttcatcgtacgcaggacatgtgtcagagatttcagtgtcggaggacggtaaacccagttgttcacgtttggcttccagcgcatgcatggcgtcaaagataactttgtcgatatccgcccccgaggccgcgctgaccgttgctgccagtgtaccttcgaccaacggcgcagcacacaaacgtacttttgcggcgatctcgggagccagcaattccagcgcagtttcagcactcaataatgcgctacccatatccatcatgaccagcacatggtcggcatcagcaacagattcgatggcctccatcactttgacggcatcggtaccaatgggattttgtggatcgtcaattcccgcggcaatggcgattttacaactatcactcattaacatctgacgggctaattcaccgacaccttctcccagtcggctgctatgtgaaactatgaccaggtttaccatcaccaattccttactcttttgcggctaacgccaacatttgcatcataaacatcaccgaggtcgcgccgggatcctggtgaccaatactgcgttcaccgagataactggcgcggcctttgcgggcttgcatcgtaatcgtactttgtgcagcggattcggcgatgctactggcagcttcgagcgccaccggaacagagagattttgctcgctggactgacgtaacgattccaccaccggcacccacacatcacacatggttttatcgccaggttcggctttcccgcgactgattacgccgtccgcgccatcgcggaacatctgataaagctcttccagtgtcaggctttgccgtgcctgggtcgcctgtgcggcgcggataaagaaggtaccgaacagcggaccactggcaccaccgacgctggaaagcagcgtcataccggtattcttgagaatgaaaccgatatctttatctgcgatagcagggagtttttccaccactttgctaaagcctcggttcatatttagcccgtggtcagcatcgccaatttcgcgatccagtccggtaagatactcgctctcggtgctgaaaatatcgccacaacgagtgagccagttaacaatttgagttctgctcagtgacattgctttctccttatttaccccagttaagggccggggtgtggaccggggcgtcccagagtgccagcgtttcgtcatcaactttcagtaaggtgattgagaaaccggtcatatccagtgaggtgcagtacgcgccaattaaattacgttcgatagtcaatcccgcttgctggcaacgtgtggtcaggcggttatagacgccgtacagctcagaaagcggagttgcgccaagattgttaaccagcgcaatcacccgatcgccagactggagcggttgtttggtttgttgttcttcctgccaactgccttgttgataatcccagaaacgcaaagtgcgatggtatgagccatttaccagcagggtgtcgaacatttcatcgacggtttgatcaagggaagagaaggggcggcggtcaatacccggctcaccatgaatgccgacgccaaactccatctcattatccgccagggtaaaagaaggtttgcccgcggcaggaacggtacaggcaccgagagcgatacctattgagtggccttgattattcagcttacgccccagttccgcacaggcgtccagtgagtcgccacgctccgccgctgcgcctacgagtttttcaattaatacggtgttggcaacgccgcgtcgcccggcagtataaagactgtcttttaccgcaacgtcgtcatcaatgaccacagtggtcacttttacgccgctatcgtgcagtaactcggtcgctgtttcaaagttaagaatatcgccggtgtaatttttgataatcaacagtacaccttcgccgccatcaacttgcatggcgcattcaaagattttatcgggcgtcggtgaggtgaaaatttcgcccggacaggcccccgaaagcatcccctgaccgatataaccacagtgcatcggctcgtgtccgctgccgccacccgacagcagggcgacttttcctgcaacaggggcatcagctcgggtgacatacaccggatcctgatgcagtgtcagcgatggatgcgctttcgccagtcctgccagttgttcgtccagtacgtcttgcacatcattgatcaattttttcattattttgctccagcaattacggtagggcatggatgatgttcaacgacacggcgaccactgactgccgatgaatccattgtgcatcaggcaagggaaaagaaaattagcccaaattatgtttcatagtgaaacatatgctttaatgaatgttccatattgaaacttttacgtgtattaatacttaaaattgcgagccggaacaccttttgtcataagggatgcgggatatgagtggcgcttttaacaacgatggtcggggcatatctcccttaattgcaacctcctgggagcgatgcaataagctgatgaaacgggagacatggaacgtaccacatcaggcccagggcgtgacatttgcttctatttatcggcgtaagaaagcgatgctgacgctcgggcaggctgcgctggaagatgcctgggaatatatggcaccgcgagagtgtgcgctgtttatcctcgatgaaaccgcctgcattctcagccgtaatggcgatccgcaaaccttgcagcagctaagtgcactgggattcaatgacggcacgtattgcgccgagggaattattggtacttgtgcgctatcgttagcggctatctctggtcaggccgtgaaaacgatggccgatcaacatttcaaacaggtactctggaactgggccttttgtgcaacgccgttgtttgacagcaagggccgattgacgggaacaatagcgctggcgtgtccggttgagcaaactaccgcagctgatttgccgttgacgttggcaatcgcccgcgaggtcggaaatttactgctgacggacagtttgctcgctgaaactaaccgtcatttaaatcaacttaatgccctgttagaaagtatggatgatggcgtgattagctgggacgagcagggtaatttgcaatttattaatgcccaggcggcgcgggtcttgcgccttgacgcgacggcaagtcagggacgggcaatcactgaactcttaacgttacccgccgtattgcaacaagcaataaaacaggcacatccgctcaaacacgtagaagcaacctttgaaagccagcaccagtttattgatgcggtgataacccttaaaccgataatagaaacgcagggaaccagctttattttgttgctccatcctgtggaacagatgcggcagttgatgaccagtcaattaggaaaagtcagccataccttcgctcatatgccacaggacgatccgcaaacccgccgcttgattcattttggtcgccaggcggcgcgcagtagctttcctgtcctgctttgtggagaagagggcgtgggcaaggcactgctaagtcaggcaattcataatgaaagcgagcgtgctgcaggtccttatatcgccgtcaattgtgagttatatggtgatgctgcgctggcggaagaatttattggtggcgatcgcacggacaatgaaaatggccgtctgagtcggctggaactggcacacggcggcacgctgtttcttgaaaagattgaatatctggcggtggagttacagtctgctttgcttcaggttatcaagcagggggttatcacgcgactggatgcgcggcgtttaataccaattgatgtcaaagtgattgcaacaacgaccgcggacctcgcaatgctggtggaacaaaatcgttttagtcgccagctgtattacgcgctgcatgcatttgaaattaccatcccgcctctgcgtatgcggcgtggcagcattccggcgctggtgaataacaaattacgcagtcttgaaaaacgcttctctacgcggctgaaaattgatgacgatgccctcgctcgcctggtttcttgtgcatggccaggcaacgattttgaactttacagcgtcatcgagaatcttgctctgagtagtgataacgggcgcattcgcgtcagtgatttgccggaacatctgtttaccgagcaggcgacagatgatgtcagcgccacccgcctttccaccagtctgtcatttgcggaagttgaaaaagaggcaattattaacgcagcccaggtcacaggcggtcgcattcaggaaatgtcggctttacttgggatcggccgcactacgctgtggcggaaaatgaagcaacatggcattgatgcagggcagtttaagcgccgggtatgaaagacagaaacgatttctgatacatcagagtgatctgtatttcattccggcgcacgctaacaattttcagcatcgtttaagggcttgtctatcccgcacttaaaagctgaagcgatatcctccgttgacttgcttctgatcaaagaggttaccctgcgtgtaatccgcttcgagatagaatgtgtgctgtttgttatactgtgcactgactcccacgccgttattccagccattacctttgaaactgtacttctcccgggagttgttcaacagatattcggtatcccctgaaaactcgcggatagcgccagtcttcacatagacattcagctggctgttgcctgcggtgatgtcataccccagtatcatgctggcacgccccagcagcgattcgtagtgattcagatgtatattgaggccattactcgccttcatagtcatctcattctggtggctgtatgtaagctgggtttgcggctctatatagaacccataaccagtaggggacaggttgaacctctgcccggcttccagggagatgctcattccattcgcagtgccgttggcgttaacgccgttgttctgactgtccagtacgtggaaactatttttctggcgcgatgcttttataacgagatcgctgtaaaaaccgttttgtgccatgtaactggcgtacattcccatgtagtctgaacgtgcggtaccgtcgcctccgctatagtccggcgatgcatgtgttgagccaatatacagaccgacatacaacggcattacatcagagagacgtttatccccaccaaactggataccgctgtaacccatgtcaaagccgctcagtttgccactggcaaaggagtccaggcttcccccataactgcgcaaccagatattaccgtctttactctgatttcgcaggtcacccatccgttgcatcagcgtacggttttcaacatagttcaataagtaaccgacattgagataattgccgccagcatctgcggtcgtggtgggtttaggcgtgggagcgggttcaggcgtaggatcggggttgactatgggaggctgagcgggagctggtgtgggttcaggattaggagtcggttccggaactgtcccggaagcgtaaagctcccagttagtgccatttttacgcacatcgtacagatatccccccaactcaacctgagaagacgcgctgaacgaggccgcgccgtcagtggtttttaccactgtcagaacttcatttcccgttgtggcctcgctgccctggttgcggatagccaatacgtgattaccagcactactcccgctgatattcaataaatcccctttattattaacgccattaccctcgccaacaacatcagcacgcataataaaggtactgttaccgctcaggttctctacgtttaatgtggcaaatgtgccggcagttgacccgtggctggcaaaatcgacagttgaatggctcagcgccagcgtgtcgagattagaattacttgttacgttccagacgctgttattcattgcaacgtccagttttccgccattgacattatcgctgagggaggaacctgtccaaaccgacccagggtgcatatccagattgattagcccacctttggaaagaacgctaccgttgataagcatacgacccgaggcgttgatgcggctggcggcataaccatcgtcatgttgcgttgcgatggccatctggtcgggtgtactcatatcaatgaccagatcgctcgtgaggtcgatctggctgttggtcatggcataaattcccctggctcctgccgcgccggtgatagccaaactgtctccggttattctaccgccgctgagagcccacaaacccagcgccagactgccattacgatcaactgtaatatcggtattttgcatgttgacaacagccgttgccgtctgggccgaggcaccataagaaccgccggaaaagatgctgtttcgttgcgctgccgtgccagtaaaattgattatcgcgtctgaaccactggtgacgaggccaccgccctgcgcggaagaaatatggctatctgcaccgatagtggttgtaccaccacgaacttcgacgccattggccgcggctccagttacatcaacagtgagtgcattcgcgctaacctggccaaagctccagaggccgtgagcattatcgccattggttttaatggtactgtttgttccgagatcgacaacagagtttttctgtacgtttatccccatggcgctgtagccctgaacatcgattgtcaggtctgtagccgtaaaacgcgcagcaccattggcgttattgccgttgagaccaccgatataaacacctgtacttccatcggtcgtgattttacttccgcttccaagatcgacactggtgccatagtcattgatggttaggcctataccgttcgagttttcaatggtgaattgagtggctgttagtgttgagctatgcccaataatgatgccgtcatcgttactcttaatggtgctgcctgtgcctaagtcagcatgggtatagtcaccaattaagttaatgccgatggcagaggtttgaccaacaacatctactgtgagtcggttagctgtcagggagctgtttttgccctgaataatgattccttttgcatatccagaggcgtcgttgacattgacggtgacatcattacccaggttgatattgccaggcgtgtttcctgctggggtcattacaccatagaggtttcctgatggatcggcggtatctcctgtaattctgtcaccatcattaatagtaatattggtgccatattgacttcctgtatcagcagctatcagcaggggggaaaagataattgcattcaaaccaatagcgccaaattttatcagttgaattgagggcgaacggatttttaattcagcgagacgatctgctttggtattcccattgtgttgtttgatgcccataccactcctatatagtacccagactatgggtctatggattttgtcattttgtttaaatcaatgaataatatcctcttatcatcatgatatttgtatggtgcaatcatgatgagcttctcagagaataattctctattaccgggcaaaatcaggaacacaggaattaatatatatttaacatcccccttacaaaggtgagtttatatcgagttattccctaagttgtcgttacttattccaattcgttactataaatatggcaaaaatattacaacaaacagcggttaaaaaatttggtgaagattttttgtaataatcctaattagttatgggaatttcgcttgatgtatctgcataacaaaaacaatatgcgccatttttgcattactaataagaaaaagcaaaaaacatcgatattcatttttggtcaatgggttttctggcctatcgttgttattgtgctactggttatcattttcatcttgccagcatattggagcgtgatcaattttgatcagctgtgaagggggctgatgtgtagtgatacaaaaacttacgttatatcactgctaatgagatatccggcatctgaacacttatgtctttaattattctcgtggttcactataggcaataagcacaaaagtgtaggatgttacaagaatgattaggactcggtgaaatgaaaaatccacgcaattgcgtggattttatatacttttgcgctcttcatgagatttagcgaaacctcatgagacaataaattaattagacgttgaaaaggaagttcatcacatcgccatctttcacgatgtaatctttaccttctgcacgcattttgcctgcttctttcgcgccttgttcacctttgtaagtgatgaaatcttcaaacgagatggtttgtgcacggataaagcctttttcaaaatcagtatggattttgcccgctgcctgcggcgcggttgctccaaccggaatggtccatgcacgcacttctttcaccccagcggtgaagtaagtttgcaggttcagcagtttataaccggcacggatcacacggttcaggcccggctcttccagcccaagctcctgcataaactcgtcacgttcttcgtcgtccagttcggcaatgtctgcttcaacagcagcacaaaccggaaccacaacagaaccttctttcgccgcgatttcacgcacctggtcaagatatgggttgttttcaaaaccgtcttcgttgacgttggcgatgtacattgttggtttcagcgtcaggaagctcaggtaacgaatagccgctttctcttcagcgcttaaatccagcgcgcgcagcatacctgcattttccaactggggcaggcatttttccaggaccgccagctcagctttcgcgtctttatcgccacctttggctttcttctgtacgcgatgaatcgcacgttcgcaggtgtcgaggtctgccagcgccagttcggtgttgataacttcaatatcgtcagccgggttaactttgccggaaacgtgaatgatgttgtcattttcaaagcagcgaacaacgtgaccgatcgcttcggtttcacggatgttggtcaggaactggttacccagaccttcgcctttcgatgcgccttttaccagaccggcgatatcgacaaattccatggtcgtgggaagcgtacgctgcggttttacgatttcagccagttgatccaggcgaggatcaggcattggtacgacgcctgtgttcggctcaatggtgcagaatggaaagttggccgcttcaataccggctttggtcagcgcgttgaacagggtagatttcccgacgttgggcaaaccgacgataccgcatttgaatcccatgatttaaatcaccttaatatcttaataatcaacctgttattgctaacagattgcagaaatggaaataactttgcctattatacacggcactcggcaaaaatgccgcagacaacgacttattgcgctttaaaggcgtgcaatcggttcgttgctttggtcaagccatctgtaaaccacatttcagtacaacgcgccgcttcgtcaatggcttcatcaattaacttctgttcactaacaggcggtttgcctaacacaaaaccgacaactttatttttatcgcccggatgaccgattccgatgcgtaaacggtgaaagttagggttattacccaatttactgatgatgtctttcagtccattgtgaccaccatggccaccgcccaatttaaatttggcgacgccaggaggcagatccagttcgtcgtgggccaccagaatttcgtccggattaatgcggaaaaaactggccatcgccgcaacggctttgccgctgagattcataaatgtagtcgggactaacaggcggacatcttcgcctccaagagtgactcgcgaagtataaccaaagaatttagcctcttcgcgcagcggagcgcgcaaacgctctgccagtaagtcaacgaaccaggcaccagcattatgtcgcgttgcggcgtattcagcaccggggttcgccaggccgacaatcaatttaatcgtcacgtttttttgtcctgagtgtgtacataactggcgcgtagtttactggttgcggccccgcttgacaaaaaactgcgtatcaaatgcagataacgtaataattgcctgagtggactattagaaagtcaaggtgttcaggcgtttatttgtaaagttttgttgaaataagggttgtaattgtgatcacgcccgcacataacccactgggtgttgtctatactttacacataaggaagaggggtattccctgttacaacccagaaagttccggaggtgacatatgaaacgcaaaaacgcttcgttactcggtaacgtgctcatggggttgggtctggtggtaatggtggtcggcgtggggtattcaatcctcaaccagttaccacagtttaatatgccccagtatttcgcacatggtgcagtgctaagtattttcgtcggtgccattctctggctggcgggtgcccgtgttggcgggcatgaacaggtgtgcgaccgttactggtgggttcgccactatgacaaacgttgccgccgtagcgataatcgccgtcatagctaacaaataatgcagtttgctgaccagtcagtttgcgctgactggtcaatctcgtacttataaatccgccatcgccgcgcgacgattcgggaagaacgccaggcgtcccgggatcggttgaatgccagcgcgagccatagtgcgcagtggctggaattccacgttgcacacgcgcagttcacatccctcgggcagacgcttcacaaaacgctggaacgcatcaagaccaccagcatcaagtaccggaacggcatcccacttcagaatcacaatccgtttgccttcaagacgtgactccaggtccgtgaataagccttcagcagcagcaaaaaacagcgggccaataacgcgcagaaccaggacatcgtctggaacatctacgactaccggtgccaggcgagtcatacgtgcgatacgacgcataaacagcagcgatgccagcacgatccccacgctgatggcaataaccatatcaaacaacacggtcagcgacatgcacagcagcatgacgatgatgtcatctttcggcgcatgacgcagcaagtcgaccactttgtgcgcttcactcatgttccacgccaccatcaacagcagggctgccatggcggaaagcggcagccaggagagcagcggtgccagtaccagcagggcaagaataaccagaatagagtggatcaccgccgagataggggacgttgccccggcacggacgttagcggcagaacgcgcgatggcagctgtagcggtaataccaccaaagaacggagcgataatattccccagtccctgtccaaccagttcgctgttcgccttgtgtttcgtcccggtcataccatccagcaccacggcgcagagcagagattcgattgcgccgagcattgccattgagaatgccgcaggcagcagtgtgcgaatagaatcccaggttagcgtgaattctgaattaggcagatcccacggcagcaccagttgcggcagcagttgcggaataccgttaccctgagaaccatcggccaggacgtagtggaattgcgaaccgatggtagcaacatgtccgccgagcaggttaacaatccccatcaccgcgcaaccagccagcaaggccggaaggtgaccgggtaaacgaatgcccagacgcggccaaaaaacaagaatacctagcgtcacaatgccaatggcagcatcacccacattaatggtcggcagcgccataaataatgcgccgactttttgtagataatgttccgggacatgggccatttgcagaccgagaaaatctttaatctgcatggtaccgatggtgatcccgatacccgaggtgaaacctaaggtgacggaaaccggaatatactcaatcaggcgaccaaagcgtgccagacccatcagaatcaaaaagatccccgacagcaaggtcgcaaccagcagtcctgccagtccaaactgttgcgacacgggatagagaattaccacaaatgccgcagtcggaccggaaacgctaaagcgtgacccacccgtcagagcaatgacaatccccgcaacagctgcggtatataaaccgtactggggtgccacaccactaccaatagccaacgccatcgccagcgggatagcaataatcccgacggttatcccggcaatcaggtcacgggtaaaccgtgcggcagtatatttttctttccagcaagcgtcgatcagagcgcggaaaggcatcacatgtgaggaaaatattttgttcacaataatgtttcatccgtgagcgcatcatctgtcaactaaatggcaggtgaaggaggcataggtcatacaaatggatattacagacaaaaaaacccgccgcagcgggtctttgagccgggttcgattagtgttcgaacatggcagagatcgattcttcgttgctgatacgacgaatcgcttcggccagcatacctgacagggtcagagtacgcacgttcggcagtgatttgatttcatcgctcagcggaatggtatcgcagacaacgacttcatcaattacagagttacgcaggttgttcgccgcgttgccagagaagatcgggtgagtcgcgtacgcaaatacacgtttagcaccacgttctttcagagcttcagcagctttacacagcgtaccgccagtgtcgatcatatcatcgaccagtacgcagtcacgacctgcaacgtcaccgatgatatgcatcacctgtgaaacgttcgcacgcggacgacgtttgtcgatgattgccatatcggtatcgttcagcagcttagcgatagcgcgggcacgcacaacgccgccgatgtccggagaaaccacaattgggttatccagattcagctgcagcatgtcttccagcaggatcgggctaccaaatacgttatcaaccggaacgtcgaagaaaccctgaatctgttcagcgtgcagatccactgtcagcacacggtcaacaccgacgctggagaggaagtctgcaaccactttcgcagtgattggtacacgagcggaacggacgcgacggtcctggcgcgcatagccaaagtaggggataacagcggtgatacgacctgcggaagcacgacgcagggcatcaaccataacgactaattccatcaggttgtcgttagtaggggcacaagtggactggatgatgaaaatatcaccaccgcgtacattttcattaatttgtacgctgacttcgccatcgctaaagcgacctacagcggcgtcgccgagtgaagtgtacaggcggttggcaatacgttgtgctagttccggggtggcgttaccagcaaaaagcttcatatcaggcacgagaagaacctcaggcatgcgtccattggtggaaagaatctgccgaaaactgtgcgggccaggcatgatcctttccaggcggtgtattaaagagcgcgatgcaacgtctggaacaaggtgacgttgtcaccgaaactcagcttgcccggcttaaagcatggctctgtgcaatggggaaagattagcgcctttcgccacaaagccattgagccattccggggcttgctctagcacctggcgggcttcagactctgtatcaaattcagcaaagacacaggcccctgtcccagtcaggcgcgacggggcgtattctaacagccaggaaagcaccgcatcaacctcgcgaaaacgttttcttgcgataacctcgcaatcattgctgaattcacattttagcaacgtttctattgacctttttggcgtattgcgcgggagttcaggatctttaaaaatcaccggagtcggaatacttacaccagggtgcgccaccagataccacttctctggcggatccaccggcgttagtatttcaccaacgccttcggcaaacgcggcatgcccccgaacaaagacaggaacatctgcgcccagcgtcagccccatttccgccagctcatccatgcttagcccgcattgccagagatgatttaatgccaccaggaccgtcgcggcattggatgaaccaccgccgagaccgccgcccatcggcaaacgcttgtcaatgctgatattcgcaccgcttcccgtcggaagacgcccgctgtctgccgcagttttcatcaacaatcgcgctgcgcgaacgatcaggttatcttcatgttccacgccttcaacgggcgttaacagacgaatatccccatcgtcacgaagctcaatgctgatggtgtcgccgtaatcaagaaactgaaacagcgtttgcagcgtgtggtaaccatccgcacgctgaccggtaatgtataaaaacagattaagttttgccggagagggccactgtgtccgcattatttcactatccagttatccatttttaacttgatgcgttgaccaccgtcggtgagttccatattggctggcatcgcaggttgcgttttggtgtcataaccaccataaacaaccttccagtttttgccattctggctgtaggtaatttcgctcaggcggtactggtcgtccagtttgtagtcggttgcatcacccggtaaacctaaaatccactggcgcaagctgttgagcggaattggcattccggtcaatttgccaatcatctcttcggcgtcatcggcggtataacgctgacctttattgtcgactaactgcacgttacccggttgagcattcagctccagttccgtgctgcccaatgggttagtgagcagcagacggtagcgatcctggccggtttgctgccagaaaaagcgggcgtacactttttgttggtcagaaatataagcgaacgcgccgcgagtctgatactgattaagattgcgcacgtcttgctgatgctgacgccattgtggcgaatccgggcttttgccaggacctttgggcgtggtaacggaacaggcagtgagcacaagagcagccagcggtagcaggcggataagacgaaaatcgggcaggggcatagtgatgacaagtccttgagatacgttgcagttataacccttaatgctagcgttaccgtccgctatcgtctatgttcaagttgtcttaattgccagaatctaacggctttcggcaattactccaaaagggggcgctctcttttattgatcttacgcatcctgtatgatgcaagcagactaaccctatcaacgttggtattatttcccgcagacatgacccttttagcactcggtatcaaccataaaacggcacctgtatcgctgcgagaacgtgtatcgttttcgccggataagctcgatcaggcgcttgacagcctgcttgcgcagccgatggtgcagggcggcgtggtgctgtcgacgtgcaaccgcacggaactttatcttagcgttgaagagcaggacaacctgcaagaggcgttaatccgctggctttgcgattatcacaatcttaatgaagaagatctgcgtaaaagcctctactggcatcaggataacgacgcggttagccatttaatgcgtgttgccagcggcctggattcactggttctgggggagccgcagatcctcggtcaggttaaaaaagcgtttgccgattcgcaaaaaggtcatatgaaggccagcgaactggaacgcatgttccagaaatctttctctgtcgcgaaacgcgttcgcactgaaacagatatcggtgccagcgctgtgtctgtcgcttttgcggcttgtacgctggcgcggcagatctttgaatcgctctctacggtcacagtgttgctggtaggcgcgggcgaaactatcgagctggtggcgcgtcatctgcgcgaacacaaagtacagaagatgattatcgccaaccgcactcgcgaacgtgcccaaattctggcagatgaagtcggcgcggaagtgattgccctgagtgatatcgacgaacgtctgcgcgaagccgatatcatcatcagttccaccgccagcccgttaccgattatcgggaaaggcatggtggagcgcgcattaaaaagccgtcgcaaccaaccaatgctgttggtggatattgccgttccgcgcgatgttgagccggaagttggcaaactggcgaatgcttatctttatagcgttgatgatctgcaaagcatcatttcgcacaacctggcgcagcgtaaagccgcagcggttgaggcggaaactattgtcgctcaggaaaccagcgaatttatggcgtggctgcgagcacaaagcgccagcgaaaccattcgcgagtatcgcagccaggcagagcaagttcgcgatgagttaaccgccaaagcgttagcggcccttgagcagggcggcgacgcgcaagccattatgcaggatctggcatggaaactgactaaccgcttgatccatgcgccaacgaaatcacttcaacaggccgcccgtgacggggataacgaacgcctgaatattctgcgcgacagcctcgggctggagtagcagtacatcattttctttttttacagggtgcatttacgcctatgaagccttctatcgttgccaaactggaagccctgcatgaacgccatgaagaagttcaggcgttgctgggtgacgcgcaaactatcgccgaccaggaacgttttcgcgcattatcacgcgaatatgcgcagttaagtgatgtttcgcgctgttttaccgactggcaacaggttcaggaagatatcgaaaccgcacagatgatgctcgatgatcctgaaatgcgtgagatggcgcaggatgaactgcgcgaagctaaagaaaaaagcgagcaactggaacagcaattacaggttctgttactgccaaaagatcctgatgacgaacgtaacgccttcctcgaagtccgagccggaaccggcggcgacgaagcggcgctgttcgcgggcgatctgttccgtatgtacagccgttatgccgaagcccgccgctggcgggtagaaatcatgagcgccagcgagggtgaacatggtggttataaagagatcatcgccaaaattagcggtgatggtgtgtatggtcgtctgaaatttgaatccggcggtcatcgcgtgcaacgtgttcctgctacggaatcgcagggtcgtattcatacttctgcttgtaccgttgcggtaatgccagaactgcctgacgcagaactgccggacatcaacccagcagatttacgcattgatactttccgctcgtcaggggcgggtggtcagcacgttaacaccaccgattcggcaattcgtattactcacttgccgaccgggattgttgttgaatgtcaggacgaacgttcacaacataaaaacaaagctaaagcactttctgttctcggtgctcgcatccacgctgctgaaatggcaaaacgccaacaggccgaagcgtctacccgtcgtaacctgctggggagtggcgatcgcagcgaccgtaaccgtacttacaacttcccgcaggggcgcgttaccgatcaccgcatcaacctgacgctctaccgcctggatgaagtgatggaaggtaagctggatatgctgattgaaccgattatccaggaacatcaggccgaccaactggcggcgttgtccgagcaggaataatggaatatcaacactggttacgtgaagcaataagccaacttcaggcgagcgaaagcccgcggcgtgatgctgaaatcctgctggagcatgttaccggcagagggcgtacttttattctcgcctttggtgaaacgcagctgactgacgaacaatgtcagcaacttgatgcgctactgacacgtcgtcgcgatggtgaacccattgctcatttaaccggggtgcgagaattctggtcgttgccgttatttgtttcgccagcgaccttaattccgcgcccggatacggagtgtctggtggagcaggcactggcgcggttgcctgaacaaccttgccgtattctcgatctcgggacgggtaccggggcgattgcgcttgcgctggctagcgagcgcccggactgcgaaattatcgctgtagatcgtatgcctgatgctgtctccctggcacaacgtaatgcccagcatctggcgatcaaaaatatccacattctgcaaagcgactggtttagcgcgctagccgggcagcagtttgcgatgattgtcagcaatccgccgtatattgacgagcaggaccctcatcttcaacaaggcgatgtccgctttgagccgctcactgcgctggttgcggcagacagtggaatggcagacatcgtgcatatcatcgaacagtcgcgtaacgcgctggtatccggcggctttctgcttctggaacatggctggcagcagggcgaagcggtgcgacaagcatttatcctcgcggggtatcatgacgtcgaaacctgccgtgactatggtgataacgagcgcgtaacgctcggccgctattatcaatgacaagtttttctacactgcttagtgttcatcttattagtatcgcgctttctgttgggctattaaccttacgtttctggctacgttatcagaagcatccacaggcatttgctcgctggacgcgcattgtgccgccggttgtcgatacgctgttactgttaagcggcattgcgttgatggctaaagcgcacatcctgccattttccgggcaggcacagtggctgactgaaaagctgtttggagttatcatttatatcgttttgggttttattgcactcgattatcgtcgtatgcacagtcagcaggcgcgcattattgccttcccgctggcgttggtggtgctgtacatcatcattaaactcgccaccacaaaagtaccgttactggggtaagtcatgagatcgttagctgatttcgaatttaataaagcgccattgtgcgaaggcatgatcctggcttgcgaagcaatccgccgcgattttccctcgcaagatgtttacgacgaactggagcgtctcgttagtctggcgaaggaagaaatcagccagcttctgcctttagaagagcagttggaaaaactgatcgcgctgttttacggcgactggggatttaaagcctcacgcggtgtttatcgtctttccgatgcattatggctggaccaggtgttaaagaatcgacagggcagtgcggtatcattaggtgcggttttattatgggtcgcgaatcgtctcgatttgccgctgctgccggtgattttccctacgcagctgatattgcgcattgaatgtccggatggcgaaatttggctgattaatccttttaacggtgaatcgttaagcgaacatatgctggacgtatggttaaagggaaatatcagcccgtcggcggaactgttttatgaagaccttgatgaagctgataacattgaggtaatccgcaaattgctggatacactcaaagcctcgttgatggaagaaaatcagatggagctggcgttacgcaccagcgaagctttattacaattcaaccctgaagatccctatgaaattcgcgatcgcgggttgatttatgcgcaactggattgcgaacacgttgcgttgaacgatttaagttatttcgttgaacagtgtccggaagacccgatcagcgaaatgatccgtgcgcaaataaataacatcgcgcataaacatattgtgctgcattaattaatcgacattttactcaagattaaggcgatcctatgaaacaaaaagtggttagcattggcgacatcaacgtagcaaatgacctgccgttcgtactgtttggcggtatgaacgtgttggaatctcgcgatctggcgatgcgcatttgcgagcactacgtaactgtgacccagaaactgggtatcccttacgtgttcaaagcctcttttgacaaagccaaccgctcctccatccactcttatcgtggaccgggcctggaagaagggatgaaaatcttccaggagttgaagcagacttttggcgtgaaaattatcaccgacgttcacgaaccaagtcaggcacagcccgttgctgatgtcgtggatgtgattcagttgccggcgtttcttgctcgccagactgacctggttgaagccatggcgaaaaccggtgcggtaattaacgtcaagaaaccacagtttgtcagcccgggacagatgggtaatatcgttgataaattcaaagaaggcggcaacgaaaaagtgattctttgcgatcgcggtgctaacttcggctatgacaacctggttgtcgatatgctgggcttcagcattatgaagaaagtgtctggtaactcgccggtgattttcgacgtgacccacgcactgcaatgccgcgatccgtttggcgcagcttccggtggtcgtcgtgctcaggtggctgagctggcacgagccggtatggcggtaggtctggcggggctgtttattgaagcgcatccggatccggaacatgcgaaatgtgatggtccatccgcgctgccgctggctaaactggaaccgttcctcaagcagatgaaagcgattgatgatctggtgaaaggtttcgaagaactggataccagcaagtaatcttttttgcttgaaaaataaagtattagcgttctgcgttaagacttttttcatgggtgccggatacaaaaaaggccgcaggctgttacccctgcggccggtttcgggcgcatattgccatcacggcagcctgacgcccgttttcaccttacttccggttacgccaccagctgacaatcgctgcggtaataattcccgccaggatcggtgctgccaggtcgtgccagaaaatcatggcaaactgcgcgagcgtcatatagccgccttgttgtaatgacaacattttgcggctattcttgaattgttctggttcaagattagcccccgttctgttgtcaggttgtacctctcaacgtgcgggggttttctctttccagcaaccaatgccaccagggataaagcccccgcaacattgcgcctcaccggataacgccggcttggtgtggatactacgactcaattcatcttcacttcatccctgaaatgtttgcaatgaagagtgcattccggtttttcaacagctgttacagtcatttcatgagtgctctggatgaggcttccagctcgggttgccaatatttacttgtggaagtgataaagacaaaaatggccgcaggctgttacccctgcggccggtttcgggcgcatattgccatcacggcagcctgacgcccgttttcaccttacttccggttacgccaccagccgacaatcgctgcggtaataattcccgccaggatcggtgccgccaggtcgtgccagaaagtcatggcaaactgcgcgagcgtcatatagccgccttgttgtaatgacaacattttgcggctattcttgaagtgtctggtttcaagattagcccccgttctgttgtcaggttttacctctcaacgtgcgggggttttctctttccagcaaccaatgccaccagggataaagcccccgcaacattgcgcctcaccggataattccggcttggtgtggatactacgtctcaattcatcttcacttcatccctgaaatgtttgcaataaagagtacattccggcttttcaacagctgttgcagtcgtttcatgagtgctctggatgatgcttccagctcgggttgccaatatttacttgtggaagagataaagacaaaaatggccgcaggctgttacccctgcggccggtttcgggcgcatattgccatcacggcagcctgacgcccgttttcaccttacttccggttacgccaccagctgacaatcgctgcggtaataattcccgccaggatcggtgctgccaggtcgtgccagaaaatcatggcaaactgcgcgagcgtcatatagccgccttgttgtaatgacaacattttgcggctattcttgaagtgtctggtttcaagattagcccccgttttgttgtcaggttttacctctcaacgtgcgggggttttctctttccagcaaccaatgccaccagggataaagccccgcaacattgcgcctcaccggataacgccggcttggtgtggatactacgtcgcaattcatcttcacttcatccctgaaatgtttgcaatgaagagtacattccggcttttcaacagctgttgcagtggtttcgtgcagggtgtggtacaggctcgcaattctgattaacgacctgtccaggtagtatgaagaaatacaataagcaggaatttatattatctcccccgattaccgtcatcggaggagatataactgtcaggcaaatatcgtcatcaaataggcggcaaacagtgccagatgcgctgcgccattgagcacgttagtacgtccggtggagaaggagatatggcacagcactaaagaggccaccatcaccaccatttctggcgcaccaagtgcaaactgcaattcgttacccgtcataaaggcaattagcgtgacgacaggtacggtaagcgaaatggttgctaacactgaaccaaagaacagattcatcgcgcgctgaacctggttgttcaacactgcttttaatgcacctaaaccttccggcgacagaatcaacagtgccaccaggaagccagtaaaggcgacaggggcattcatgctgtcgagcaatgtctccagcgagctggcgttcattttggtcaccgcaataacggcaatcagatggataatcaaccagatagcatgccacaggctgctatgggcagacggtttaccgtgatgcgggtcgtcatcatcactgtcatcttcgtgctcgtagacaaacaaactttgatgcgttttggtctggatcagcaaaaatacgccatacattgccgcagaaattaatgctaccagtaacgcctgaccggttgaaaaattcgccgcaggcagagccattggaaataccagtacgattatcgccagggggaacagcgcaattaaatactgcttgataccaaacagattcatatattgggtggcaaacttacgaccgcccaacaataatgaaaagccaaccagcccaccggtaacaatcataatgattgaatagagcgtatcacgcattagcgttggcgcggcgtcgccggttgccattaaagctgaaatcaaactgacttcaagaataaccactgaaaggctaagaataagcgaaccgtaaggttctcccaggcgatgggctaatacgtccgcatgacggacaacactaaaggcgctacttaaaataccaataagcgcaagaagattgatggcaatgaccactggtagtgtctggctgcttccccacaggaacagcactaccagcgccagaaccgggaaaataagcgaagtctccttgtggcgggtttttaccgcctcttgagcatttgacattatggttatccctttgcagatgaatttatcgaaaatgtaaaaaataggtaggaaaaataacagaaagtgtctggatatcggtaacattttacgaatttttaccccgctgtcgattttttactcattggggcataaaaataagtattacgtttagacaatgtttgttttagcgtctcttaagaagagtctgacctgaaaattcttatgttttggcaagagtagatattgttgaccacacttaatgttcaactttgtaaaaggagtcaacgatgccgtataaaacgaaaagcgatctgccggaaagcgtaaagcacgttctaccgtctcatgcccaggatatctataaagaagcgttcaacagcgcatgggatcaatataaagataaagaagatcggcgtgatgacgccagtcgcgaagaaaccgcgcataaagtggcctgggctgctgtgaagcatgaatatgccaaaggggatgatgataaatggcataaaaaatcgtaaaaccggtcgcttagttaaagctattcgtgcggtgttgccttgcaagtggtccgtggattgcatattgtcccgttagtggtttcaaaatgagcagtaaaaatgtccggaagacaccaaaaagttgtcgcagggaagtatgcagtggcggaagtgtaaggtgataacgcgtgatttcttgatgaatgccgattgtaaaacggcatttggtgccattgaagaatcactcttatggtcagcagaacaacgggcggcttcgctggcggcgacgctggcttgtcgacctgatgagggaccggtgtggatcttcggctatggatcgttgatgtggaatccggcactggagtttaccgaatcgtgcaccggtacactggttggatggcatcgcgcattttgcctgcgcctgaccgccgggcgcgggactgcgcaccagccgggacggatgcttgcactgaaagagggcggacgcaccacaggcgtcgcctatcgactgccagaagagacgctggagcaggaactaaccctgttgtggaagcgagagatgattaccggctgttatctgccaacctggtgtcagcttgatcttgatgatggacgcacagtaaacgccattgtgtttattatggacccgcgacatccagaatatgaatctgatactcgcgctcaggtcatcgcgccgttgattgcggcggcgagcggtccgctgggaaccaacgcacaatacctgttttcactggaacaggagcttatcaaactgggaatgcaggacgatgggctgaatgatttgctggtatcggtaaaaaaactgctggcggagaattttccggatggtgtgttacgtccgggattcgcctgagtaaacttcccgcatagtggggcgtcagacgccccctcaaacattaaaatgtgagcactttatcggctgacagcgtccattgcgccagttccacaagagtaccgatttccaccccatcaatcagaggaagtgtactaatcccgcgcccgtcggtacaggttttgcacaatttcaccggtacattctgagcggtaaggatctccagcatttgctgaatgttgtagccttcccctggtttttgcccgcgcaacccggctgtgaccgcatcagacatgaggaacagacgcagatccagattgctctcctgctctcgtaacgcaatggccagccgcaagctgttaaacaaggattcgctcccgtaaggtgcgccattggcaacgatcacgattttttgcattatttactcctgtattcagggaattagacactcatcttctatcttactgcttctgcagcgtctgaccaatcggtcacatttttaaggattttcctgaaagcgcgagaaaatacgacaaaagttgccagtaatcgttattctttaaggctatggtttttcattattaccggaagttaccgacgttttgagccgtttcgttcctcgcattatcccgttttatttactcttgcttgtagcaggcggtacagctaacgcacaatctaccttcgagcaaaaagcggcaaatccctttgataataacaatgatggtctgccggatttaggcatggctcccgaaaatcatgatggggaaaaacactttgctgaaattgtgaaagatttcggcgaaaccagtatgaatgataacgggctggatactggcgagcaggcaaaagctttcgcattgggaaaagtccgcgacgcgcttagtcaacaggttaatcagcacgtagagtcctggctatcaccgtggggaaatgccagtgttgacgtcaaagtggataacgaaggacatttcaccggcagtcgtggaagctggtttgtgccgttacaagataatgatcgttatctcacctggagccagcttggtcttactcagcaggataatgggttggtgagcaatgtgggcgttgggcaacgctgggcgcgcggcaactggctggtgggttataacactttttatgacaacttgctggacgaaaatcttcagcgagcgggctttggtgccgaagcgtggggcgaatatttgcgattatcggcaaacttttatcagccgtttgctgcatggcatgaacagacagccacgcaggaacaacggatggcgcgcgggtacgacctgacagctcggatgcgcatgccgttctatcaacacctcaataccagtgtcagcctagaacagtattttggtgatcgtgttgatttgtttaactctggtacgggttatcacaatcccgtcgcgttgagtctgggattaaattacacccctgtgccattagtcactgtgacggcccagcataaacagggtgaaagtggcgaaaatcaaaataacctcgggctgaatcttaattaccgctttggtgtaccgctcaaaaaacaactttctgcgggcgaggttgccgaaagtcagtcgttacgtggtagtcgctatgacaatccgcagcgaaataatctaccgactcttgagtaccgacagcgaaaaacgttaacggtgtttctggcgacaccgccgtgggatctaaaacctggcgaaacagtgccgctgaaattacaaatccgcagtcgttacggtattcggcaactgatttggcagggcgatacgcagatattaagtttgacgccgggcgcacaagccaacagcgcggagggctggacgctgatcatgcctgactggcagaacggggaaggggcaagcaatcactggcgattgtctgtggtggtggaagataaccaggggcagcgtgtctcctccaatgagatcacgctaacgcttgtcgaaccgttcgatgcattgtcaaacgacgaactgcgctgggaaccgtaatcagaaaatgcgctcctgatgcacccataccgctgcttccacgcgagacttgagcttcattttcttcagcatgtgcttgacgtgcacttttactgtgctttcggtgatatccaggcggcgggcaatcatcttgttcggcaaaccctgggcaatcagcttgagaatatcgcgctcgcgtggggttaactggttaacatcgcgctcagtagtggcacggttagcgcgcaagctggcggccagaacaggcgttaatgcttcgcttaataccatttcgccagcagctgcctgatgcaatgctttcagcagatcttccggttccatatcttttaacagatagccatccgcgccgcgtttcagtgcggtgaccacatcttcttcatggttagagacgctgaataccacaatgcgccctgagagggacttttcgcgcagtttatccagcgtttccagaccgttcatgccgggcatattgagatctaacaggatcagatcgggatcaagagactccgccagttcaataccctgttcgccattactcgcttcgccaaccacggtgatatctggtgccatactgataagctgttttacgccagttcgcagcatcgggtgatcgtcaatcagcaggatagtagccggttcctgattactcatgggtatctccttggacgtctgtgaaagttttttcgggaataaaggtgaccaccacttcggtgccacctgattcacgacggcggacgcggcaatcgcctcgtaaactttgcgcacgatcgcgcattattatcatgccgtagtgattgctgcggatggcattttcaggcacgccgcagccgttatcctggacggtcagtttgacctgattatcgttttgcgccaccgtcaccacgacttcactcgcttgcgaatgtttgagggcgttacttaatgcctcacgggcaatttgcaacaagtggattgcctgatgcgaaggcaccaggcgaggcggcaattgataatccagcttcaccgggaagccaaatttggcgctgtactcttcgcaactcgcctccagcgccggacgtaatccaggctcggtgagctgcaagcggaatgtggtgagcaattcacgcaactgcgcccaggatgcattcagttcgttacggatctgacttaacagttcgcggctgctttctggcagcgcatcgccctgcatctgtaaacaactcacctgcatcttcatgcaagagagagattgggcaatagaatcatgcagttcgcgcgcaatggtggcacgctcttccatcacgatcaactgttgctgacgttcctgatggcgatccagcgccagcgtggcggtgagttgttcaaccagggtatccaccagttgttgttgatcatggctaagatgacgcccctgcggcagggtcgccagcaaaataccgtactgcgtatgagagtcagccagccgccacttcagggtcgtgccgcgatcaccaacgggtaatacgccgcgcgggcagagctggcagcctttatcatcacaagtcatatctggctggcaggtaaactcctgatgattctcttcatcatcagtgtcatacacccgcaattcgatatcacgtagcagggttaaattctgtaagccgttgagtacaggtgacaggcgttcacacagcggggcgcgggaatgcaaacggcggttagcctgccataaaaaagagaggatctgatttttatgctccagcccggcggttttctcctgaacccgctgctcaagtacggcataactttcggccagttctgcagacatattgttcaacgcagttccaagcatcgccatttcgttgcgcccgctgatgtttgcgcgttgggtaaaatcgcgatgactgacggcactcgccattgccagcagttgccgccacggttgtagcagtcgcgcccgcaaccagataatagtgaacaccagtaaaagtgccataaataccgccattacccgatggaccagtaccactgtctcgatgcgcatttccgtggtgcggtcaaaaccagataccagttgatcaagcccggcaacaaactggctgacatccgctgacaccgtttctcggttttgtgcacgcatcagcgcagggatcagttcattacgccagtaatcttgtaaaccctgtaattgcgccagttgtccgtctcgttctgctgctcgagtcaactcggcgctaaatgccgtttgttccatctctttaattaagggcttgtctttctcgcttaatggcactgccgccaacagacggtaactttgcatgcgcagcgatcccgctttgttgatcgcatgggcgctgccctgaacgccttgcaccagccagccagaaaccgccatccctgccagtccaatagcagtagaaagcaacacaataagcgcaacctgattaaccagggtgagcggagagagacaacgtttaagcatgtaaacctcttccttcaggctttaaatgagcaataaccttaatgaatgtgacgatacattctggaatggcagtattctcggctattggctgaagtatacccatacccggaaagagttactccttatttgccgtgtggttagtcgctttacatcggtaagggtagggattttacagcaccgtgaaaaatctcataatttttatgaagtcactgtactcactatgggtaatgataaatatcaatgatagataaagttatcttatcgtttgatttacatcaaattgcctttagctacagacactaaggtggcagacatcgaaacgagtatcagaggtgtctatgagtcactcatccgcccccgaaagggctactggagctgtcattacagattggcgaccggaagatcctgcgttctggcaacaacgcggtcaacgtattgccagccgcaacctgtggatttccgttccctgtctgctgctggcgttttgcgtatggatgttgttcagcgctgttgcggtgaacctaccgaaagtcggctttaattttacgaccgatcagctatttatgttgactgcgctgccttcggtttctggcgcgttattacgtgttccatactcctttatggttcctatcttcggtggtcgtcgctggacggcgttcagcaccggtattctgattattccttgcgtctggctgggttttgccgtgcaggatacctccacgccttatagcgtcttcatcatcatctctctgctatgcggctttgctggcgcgaacttcgcatccagtatggcaaacatcagcttcttctttccgaaacagaagcagggtggcgcgctgggtctgaatggtggtctgggaaacatgggcgtcagcgtcatgcagttggttgctccgctggtggtatcactgtcgattttcgcagtatttggtagccagggcgtcaaacagccggatgggactgagctgtatctggcgaatgcgtcctggatatgggtgccgttccttgccatcttcaccattgcggcgtggtttggcatgaacgatcttgctacctcgaaagcctccatcaaggagcagttgccggtactcaaacggggtcatctgtggattatgagcctgctgtatctggcaaccttcggctccttcatcggcttctccgcgggctttgcaatgctgtcaaaaacgcagttcccggatgttcagattctgcaatacgctttcttcgggccgtttattggtgcgctggcgcgttctgcaggtggtgcattatctgaccgtctgggcggaactcgtgtcacgctggtgaactttattctgatggcgattttcagcggcctgctgttcctgaccttaccgactgacgggcagggcggaagcttcatggcgttcttcgcggtcttcctggcgctgttcctgacagctgggctgggtagtggttccactttccagatgatttcagtgatcttccgtaaactgacaatggatcgcgtgaaagcagaagggggttctgacgaacgtgcgatgcgtgaagcggcaaccgacacggcggcggcgctgggtttcatctctgcgattggcgcgattggtggcttctttatcccgaaagcgtttggtagctcgctggcattaacgggttcgccagtcggcgcaatgaaggtatttttgattttctatatcgcctgcgtagtgattacctgggcggtatatggtcggcattctaaaaaataaaccgttactcgtcatacttcgggttacatgtgctgcggctgcgttcattcaccccagtcacttactttagtaagctcctgggattcattcacttgccgccttcctgtaaaccgaattatatagagtaaaatatttgattatcctttgcgcggcatgatgtcgcgctttttttatgcgtcatttagttacaacatactaatgttatatggtttatttcgccggatttcattaagagccattaatatgttacccatggggaatactccttaatacccatctgcataaaaatcttaatagtttaaataactacaggtataaaacgtcttaatttacagtctgttatgtggtggctgttaattatcctaaaggggtatcttaggaatttactttatttttcatccccatcactcttgatcgttatcaattcccacgctgtttcagagcgttaccttgcccttaaacattagcaatgtcgatttatcagagggccgacaggctcccacaggagaaaaccgatgagtaaattcctggaccggtttcgctacttcaaacagaagggtgaaacctttgccgatgggcatggccagcttctcaataccaaccgtgactgggaggatggatatcgccagcgttggcagcatgacaaaatcgtccgctctacccacggggtaaactgcaccggctcctgcagctggaaaatctacgtcaaaaacggtctggtcacctgggaaacccagcagactgactatccgcgtacccgtccggatctgccaaaccatgaacctcgcggctgcccgcgcggtgccagctactcctggtatctttacagtgccaaccgcctgaaatacccgatgatgcgcaaacgcctgatgaaaatgtggcgtgaagcgaaggcgctgcatagcgatccggttgaggcatgggcttctatcattgaagacgccgataaagcgaaaagctttaagcaggcgcgtggacgcggtggatttgttcgttcttcctggcaggaggtgaacgaactgatcgccgcatctaacgtttacaccatcaaaaactacggcccggaccgtgttgctggtttctcgccaattccggcaatgtcgatggtttcttacgcatcgggtgcacgctatctctcgctgattggcggtacttgcttaagcttctacgactggtactgcgacttgcctcctgcgtctccgcaaacctggggcgagcaaactgacgtaccggaatctgctgactggtacaactccagctacatcatcgcctgggggtcaaacgtgccgcagacgcgtaccccggatgctcacttctttactgaagtgcgttacaaagggaccaaaactgttgccgtcacaccagactacgctgaaatcgccaaactgtgcgatctgtggctggcaccgaaacagggcaccgatgcggcaatggcgctggcgatgggccacgtaatgctgcgtgaattccacctcgacaacccaagccagtatttcaccgactatgtgcgtcgctacaccgacatgccgatgctggtgatgctggaagaacgcgacggttactacgctgcaggtcgtatgctgcgcgctgctgatctggttgatgcgctgggccaggaaaacaatccggaatggaaaactgtcgcctttaataccaatggcgaaatggttgcgccgaacggttctattggcttccgctggggcgagaagggcaaatggaatcttgagcagcgcgacggcaaaactggcgaagaaaccgagctgcaactgagcctgctgggtagccaggatgagatcgctgaggtaggcttcccgtactttggtggcgacggcacggaacacttcaacaaagtggaactggaaaacgtgctgctgcacaaactgccggtgaaacgcctgcaactggctgatggcagcaccgccctggtgaccaccgtttatgatctgacgctggcaaactacggtctggaacgtggcctgaacgacgttaactgtgcaaccagctatgacgatgtgaaagcttataccccggcctgggccgagcagattaccggcgtttctcgcagccagattattcgcatcgcccgtgaatttgccgataacgctgataaaacgcacggtcgttcgatgattatcgtcggtgcggggctgaaccactggtatcacctcgatatgaactatcgtggtctgatcaacatgctgattttctgcggctgtgtcggtcagagcgggggcggctgggcgcactatgtaggtcaggaaaaactgcgtccgcaaaccggctggcagccgctggcgtttgcccttgactggcagcgtccggcgcgtcacatgaacagcacttcttatttctataaccactccagccagtggcgttatgaaaccgtcacggcggaagagttgctgtcaccgatggcggacaaatcccgctataccggacacttgatcgactttaacgtccgtgcggaacgcatgggctggctgccgtctgcaccgcagttaggcactaacccgctgactatcgctggcgaagcggaaaaagccgggatgaatccggtggactatacggtgaaatccctgaaagagggttccatccgttttgcggcagaacaaccagaaaacggtaaaaaccacccgcgcaacctgttcatctggcgttctaacctgctcggttcttccggtaaaggtcatgagtttatgctcaagtacctgctggggacggagcacggtatccagggtaaagatctggggcaacagggcggcgtgaagccggaagaagtggactggcaggacaatggtctggaaggcaagctggatctggtggttacgctggacttccgtctgtcgagcacctgtctctattccgacatcattttgccgacggcgacctggtacgaaaaagacgacatgaatacttcggatatgcatccgtttattcacccgctgtctgcggcggtcgatccggcctgggaagcgaaaagcgactgggaaatctacaaagccatcgcgaagaaattctccgaagtgtgcgtcggccatctgggtaaagaaaccgacatcgtcacgctgcctatccagcatgactctgccgctgaactggcgcagccgctggatgtgaaagactggaaaaaaggcgagtgcgacctgatcccaggtaaaaccgcgccacacattatggtcgtagagcgcgattatccggcgacttacgaacgctttacctctatcggcccgctgatggagaaaatcggtaatggcggtaaagggattgcctggaacacccagagcgagatggatctgctgcgtaagctcaactacaccaaagcggaaggtccggcgaaaggccagccgatgctgaacaccgcaattgatgcggcagagatgatcctgacactggcaccggaaaccaacggtcaggtagccgtgaaagcctgggctgccctgagcgaatttaccggtcgtgaccatacgcatctggcgctgaataaagaagacgagaagatccgcttccgcgatattcaggcacagccgcgcaaaattatctccagcccgacctggtctggtctggaagatgaacacgtttcttacaacgccggttacaccaacgttcacgagctgatcccatggcgtacgctctctggtcgtcagcaactgtatcaggatcaccagtggatgcgtgatttcggtgaaagcctgctggtttatcgtccgccgatcgacacccgttcggtgaaagaagtgataggccagaaatccaacggcaaccaggaaaaagcgctcaacttcctgacgccgcaccagaagtggggtatccactccacctacagcgacaacctgctgatgctgactttaggtcgcggtggtccggtggtctggttgagtgaagccgatgccaaagatctgggtatcgccgataacgactggattgaagtcttcaacagcaacggtgctctgactgcccgtgcggttgtcagccagcgtgttccggcagggatgaccatgatgtaccacgcgcaggaacgtatcgttaacctgcctggttcggaaattacccaacagcgtggtggtatccataactcggtcacccgtatcacgccgaaaccgacgcatatgatcggcggctatgcccatctggcatacggctttaactactatggcaccgtaggttctaaccgcgatgagtttgttgtagtgcgtaagatgaagaacattgactggttagatggcgaaggcaatgaccaggtacaggagagcgtaaaatgaaaattcgttcacaagtcggcatggtgctgaatctcgataagtgcatcggctgccacacctgttcagttacctgtaaaaacgtctggaccagccgtgaaggcgtggaatatgcgtggttcaacaacgtggaaaccaagccgggccagggcttcccgactgactgggaaaaccaggaaaaatacaaaggcggctggatccgtaaaatcaacggcaaactgcagccgcgcatgggtaaccgtgccatgctgctgggtaaaatcttcgctaacccgcatctgccggggatcgacgattattacgagccgttcgattttgactatcagaacctgcataccgcgccggaaggcagcaaatcgcagccgattgcccgtccgcgttcgctgattaccggggaacggatggcgaaaatcgaaaaagggccgaactgggaagatgacctgggcggtgagtttgacaaactggcgaaagacaagaacttcgacaacatccagaaggcgatgtatagccagttcgaaaacaccttcatgatgtatttgccgcgcctgtgcgaacactgcctgaacccggcatgtgtggcgacctgcccgagcggtgcgatttacaagcgtgaagaagatggcatcgtcctgatcgaccaggataaatgccgtggctggcgtatgtgcatcactggatgcccgtacaaaaaaatctacttcaactggaagagcggtaagtctgagaagtgcatcttctgctatccgcgtattgaagcgggtcagccgaccgtgtgctcagaaacctgtgtcggtcgtatccgttatcttggcgtgctgttgtacgatgccgacgctattgaacgtgcagccagcaccgagaacgagaaagatctttaccagcgtcagctggacgtgttcctcgatccgaacgatccgaaagtcatcgagcaggcgattaaagacggtattccgctgagcgttattgaagccgcacagcagtcgccggtttataaaatggcaatggaatggaaactggcgctgccgctgcatccggaatatcgcacactgccgatggtctggtacgtgccgcctctgtctccgattcagtctgcagcagacgcgggtgagctgggtagcaacggcattctgccagacgtcgaaagcctgcgtattccggtacagtatctggcgaatctgctgaccgccggtgataccaaaccggtactgcgcgcactgaaacgtatgctggcgatgcgtcattacaaacgtgctgaaaccgttgacggtaaagttgatacccgtgcgctggaagaggtcggtctgaccgaagcccaggcacaggagatgtaccgttatctggcgattgctaactacgaagatcgctttgtggtgccgagtagtcatcgtgaactggcacgggaagccttcccggagaaaaatggctgcggctttacctttggtgatggctgccacggttcagataccaaattcaatctgttcaacagccgtcgtatcgatgccatcgatgtgaccagcaaaacggagccgcatccatgatcgaactcgtgattgtatcgcgtctccttgaatatccggatgctgccttatggcagcatcaacaagagatgtttgaggcgattgccgcgtcgaaaaatctgccaaaagaggatgcccatgcgctgggcattttcctgcgcgatttaacgacgatggatccgctcgatgcccaggcgcagtacagcgaactgttcgaccgtggccgcgccacgtcactgttgctgtttgaacatgtgcacggcgaatcccgcgaccgcggccaggcgatggtggacctgctggcgcagtacgagcagcacggcttgcagttaaacagccgcgaattgccggaccatctgccgctgtatctggagtacctggcgcagctgccgcaaagcgaagccgtggaaggtttgaaagatatcgcgccgattctggcattgctgagcgcgcgtctgcaacagcgtgaaagccgttatgccgtgctgtttgatctgctgctgaaactggcgaataccgctatcgacagcgacaaagtggcggaaaaaattgccgacgaagcgcgcgatgatacgccgcaggcgctggatgctgtctgggaagaagagcaggttaaattctttgctgacaaaggctgcggtgattcagcaatcactgcgcatcagcgtcgctttgccggtgccgtcgcgccgcaatatctgaatatcaccaccggaggacagcactaatgcaattcctgaatatgttcttctttgatatctacccgtacatagccggggcggtcttcctgattggtagctggctgcgttatgactacgggcagtacacctggcgcgcggcgtccagccagatgctggatcgcaaagggatgaacctggcgtcgaacctgttccatatcgggattctggggatttttgtcggtcacttcttcggtatgctgacgccgcactggatgtatgaagcctggctgccgattgaagtgaaacagaaaatggcaatgtttgctggtggtgccagcggcgtgctgtgtctgattggcggcgtgctgttgctgaaacgtcgtctgttcagcccacgcgtgcgtgcaaccactaccggagcggatatcctgatcctgtcgctgctcgttatccagtgcgcgctgggcctgttgaccattccgttctccgctcagcatatggacggtagcgagatgatgaaactggttggctgggcgcagtcggtggtgaccttccacggtggcgcttctcaacacctcgatggtgtggcgtttatcttccgtctgcacctggtgctggggatgacgttattcctgctgttcccgttctcgcgtctgatacacatctggagcgtaccggtggagtatctgacacgtaagtaccagctggtgcgcgctcgtcactaagcgaattttagttcacatagaccctgcttcggcggggtttttttatgggcacggtgcggggtgagttgtcggatgcgcttcgcttatccgacctacaggggaggatattgtaggcccggtaaacgtggtgccatcgggcaaaattagctcggagtaacaggttttgattatttaaggaagcgatggtggtgggggaaggattactcagcgctgcgcgcttcgcccttcgggtcgttgcctgcggcaacgctctctcgctggcgctcaagtcgaaccttggtcgaagcttctcatccttccccgcttgggcagaatatttgattgcggattcgtttgagaattccggggcttttgaaagtgatggtggtgggggaaggattactcagcgctgcgcgcttcgcccttcgggtcgttgcctgcggcaacgctctctcgctgacgctcgagccgaaccttagtcgaagcttctcatccttccccgcatgggcagaatatttgattgcggattcgcttgagagttcagggacttttgaaagtgatggtggtgggggaaggattactcagcgctgcgcgcttcgcccttcgggtcgttgcctgcggcaacgctctctcgctggcgctcgagtcgaaccttggtcgaagcttctcatccttccccgcatgggcagaatatttaattgcggattcgttgggaagttcagggacttttgaaagtgatggtggtgggggaaggattcgaaccttcgaagtcgatgacggcagatttacagtctgctccctttggccgctcgggaaccccaccaggggtaattcaaattttgaggtaatgcttgagatggtggtgggggaaggattattcgtcgcttcgctcctcacccttcgggccgttgcctgtggcaacgttctctcgctttcgctcgaatcgaaccttagtcgaaggttctcacccttccccgatgagtgcaaactttcacaatctcaccgaagttaccacatcgctgtggtgaattatggtggtgggggaaggattcgaaccttcgaagtcgatgacggcagatttacagtctgctccctttggccgctcgggaaccccaccacggggtaatgctttttactggcctgctcccttatcgggaagcggggcgcatcatatcaaatgacgcgccgctgtaaagtgttacgttgagaaaaatgaactggttgcgtaattttcatccgtaacggattaaaggtaaccagttatttttgctggcgattaaagaataatcgttcgattaccgtaaacaaagacgcgctgtgccagtactttgtatagtgcacgacttaagacgtttttctcgacgtcacgacctgcgcgcatcatatcttcagctgtgtaggtatgatcgacatgaataacgtcctgcatgatgattgggccttcgtccagattgtcattcacatagtgagcggttgcgccaataatcttcacaccacgttcataggcctggtgataaggacgtgcgccaataaacgctggcaggaatgaatggtgaatattgatgatcttattcgggaagcgtgccacaaattccggcgttaatacccgcatatacttcgccagcaccacgtagtcaggttgataagcatcaatggcatccgccatcttttgatcgtgctcgttgcgggttaacccttcatggcttaccagctcaaacggaatatcaaaacgctcaaccagagaacgtaaagtatcgtggttaccaataactgccgcgatttcgacatccaggccgccgtaattggctttcatcaacaaatcgccaaggcaatgcgcttctttagtgaccagaatcactatccggcgacgaccggcaggattcagctcacgcacggagccttctggcaatgcgctatcgagatccgccagcagggtggaatcattaaaaatcccttccagttccgtgcgcataaaaaagcgcccggtacggtgatcaacaaattcattgttctgtacgatatttaactcgtgcttgtagcaaatattggtaatacgtgcgatcagacctttttggtccggacaaatagtacgcagaactttacgttggagtgaatgcattgctggaaaaaccttgttgagagtgtttgctaaaccgtaccgtcaaccattattggccgcagcactttttaaattttttacctgaaccacaagggcagggatcgttgcgaccaaactgcggacgtgtaccgtcaatatagtaccattgaccgttttctttcaaaaatcgcgaacgttcaattattgcacctgttttaccaccttcggtaaatcgagcaacaaaactgacaaatccgatattgtcggcgtcctgccaacaatgttcaaatacggtcaatcccaaccattcagtatgcgcaaatccggccatcaattcggcacgtaacgccgctgctccacaagagggatgccaggtctttattaaataatctgcgtcttgcatcacaaaagcgcagtaacgcgaacgcatgagatgttctggatcaggtgcaaccttttcaccagacacataagggtggcaacataggctatactcgacagcactaccacagggacaaagctgagacacaaataatctccctggaaacaataacggcgtattaaccgcctgagtagcactatgttaaccgagcagtagcgatgtggctacgattgcattccaggggaatcttgcgggaataatgagaaagataaaaatagggctggcgctgggatctggcgcggcgagaggttggtcgcatattggcgttattaatgcgctaaaaaaagtgggtattgaaattgatatcgttgcaggatgttcaattggttcgctggtgggcgctgcctatgcatgcgatcgattatctgcgctggaagattgggtgacctctttcagttattgggatgttttacgcctgatggatctctcctggcagcgcggtgggttactgcgcggcgagcgtgtcttcaatcaataccgcgaaataatgccggaaacagagatcgaaaattgttcccgtcgctttgcggctgttgccaccaatttaagtacgggacgtgaattatggtttactgaaggcgatctccatcttgctattcgcgcatcatgcagtattccaggactcatggcacctgttgcacataacggctactggctggttgatggagcagtcgttaacccaattcctatttccctcacgcgtgcattgggggctgatattgtgatagcggttgacctgcagcacgatgctcatttgatgcaacaagatttgctctcctttaatgtcagtgaagaaaatagcgagaatggtgattctctgccgtggcatgcgcgtctgaaagaaaggttaggcagcataacgacacgtcgggcggtgacagcgccaacggcaacagagattatgaccacttctatccaggtgctggagaaccgccttaaaaggaaccgcatggcaggtgatccgcccgatattctgattcaacctgtttgcccgcaaatatctacgcttgatttccatcgcgcgcacgctgccattgcggccggacagctggcagtggaaaggaaaatggacgaacttttgccgttggtacgcaccaacatttgaccagaatttttatctacacttaagttaattctgacaggcgcaggtggcaatagcatgccactattgagtaaagccagtcaggggagagaacatgacgcagccattggtcggaaaacagattctcattgttgaagatgagcaggtatttcgctcgcttctggattcatggttttcctcattgggagcgacaacggtactggcggctgatggggtggatgcccttgagttgctgggaggtttcactccagacctgatgatatgtgatatcgcgatgccacgaatgaacgggcttaaactgctggagcatatacgtaacagaggcgaccagaccccagttctggtgatatctgccactgaaaatatggcagatattgccaaagcgttacgtctgggcgttgaagatgttttgctgaaaccagttaaagatctgaatcgcttgcgcgagatggtttttgcctgtctctatcccagcatgtttaattcgcgcgttgaggaagaggaaaggctttttcgcgactgggatgcaatggttgataaccctgccgcagcggcgaaattattacaggaactacaaccgccggttcagcaggtgatttcccattgccgggttaattatcgtcaattggttgccgcggacaaacccggcctggtgcttgatattgccgcactttcggaaaacgatctggcattttattgccttgatgtcacccgagctggacataatggcgtacttgctgccttgttattacgcgcattgtttaacggattattacaggaacagcttgcacaccaaaatcaacggttgccagagttgggcgcgttattgaagcaggtaaaccatttacttcgtcaggccaatctgccggggcagtttccgctattagttggctattatcatcgcgaactgaaaaatctcattctggtttctgcgggtctgaatgcgacgttaaataccggcgaacaccaggtgcaaatcagtaatggtgttccgttaggcactttaggtaacgcttatttgaatcaattgagccagcgatgcgatgcctggcaatgccaaatatggggaaccggtggtcgactgcgcttgatgttgtctgcagaatgagcaaacgataacgcgggctaaatttgcattacctgctaatgtcggctggtggtactatcgtcgccattcgtataagtaattgtcttaattatgctaactcgcctccttttcagaacttagccccttcggggtgctgatatactgggatgcgatacagaaatatgaacacgttcaaaacacgaacagtccaggagaatttaaatggctgccattaatacgaaagtcaaaaaagccgttatccccgttgcgggattaggaaccaggatgttgccggcgacgaaagccatcccgaaagagatgctgccacttgtcgataagccattaattcaatacgtcgtgaatgaatgtattgcggctggcattactgaaattgtgctggttacacactcatctaaaaactctattgaaaaccactttgataccagttttgaactggaagcaatgctggaaaaacgtgtaaaacgtcaactgcttgatgaagtgcagtctatttgtccaccgcacgtgactattatgcaagttcgtcagggtctggcgaaaggcctgggacacgcggtattgtgtgctcacccggtagtgggtgatgaaccggtagctgttattttgcctgatgttattctggatgaatatgaatccgatttgtcacaggataacctggcagagatgatccgccgctttgatgaaacgggtcatagccagatcatggttgaaccggttgctgatgtgaccgcatatggcgttgtggattgcaaaggcgttgaattagcgccgggtgaaagcgtaccgatggttggtgtggtagaaaaaccgaaagcggatgttgcgccgtctaatctcgctattgtgggtcgttacgtacttagcgcggatatttggccgttgctggcaaaaacccctccgggagctggtgatgaaattcagctcaccgacgcaattgatatgctgatcgaaaaagaaacggtggaagcctatcatatgaaagggaagagccatgactgcggtaataaattaggttacatgcaggccttcgttgaatacggtattcgtcataacacccttggcacggaatttaaagcctggcttgaagaagagatgggcattaagaagtaacatccgtatcggtgttatccacgaaacggcgttgagcaatcgacgccgtttttttatagcttattcttattaaattgtcttaaaccggacaataaaaaatcccgccgctggcgggattttaagcaagtgcaatctacaaaagattattgcttgatcaggaaatcgtcgagggatttaccttgctcatccattgcttttttgattacagctggagtacggccttggccagtccaggttttagtttcgccgttttcgtcaacgtagctatattttgccggacgctgagcacgtttagctttggtgccagatttaacggcagcaaggctattcagcagttcgttcgggtcaataccgtcagcgatcagcatttcgcgatattgctgcagtttacgagtgcgctcttcaacttcagcagcagccgcgctttcttcttcgcgacgttcgttaacaacaacttctaatttttccagcatttcttccagcgtttcaagtgtacattctcttgcctgcgcacgaagagtacggatgttgttcagaattttaagtgcttcgctcattgtagtaatctcaaacttatattggggtggtttgttgaggtaataatagagccttaaattcagttgtgcaatagccaggaatgtaaggaattcaaaattgttctttattttgtgccgccaataaatatcttttcataaaattagccagaaaagacgcggcatatagccctatttacaccgatgatttcgcagcacgtgaggttaaaacttcctgattcatgtcacattttatggggagattatcgtaggctgacgacctttcagtcttctgtattagttgtgtttacgagaattccctattaagcgaatgatgaaaagtagaacagtcgcaataagagcatggacttagtattgcactatctcctggaggtcaacagagggctattacttgcgcaacaggttaaagattgtgaatagttaccagcagtcatttacccgcttataacaagcgaggcagttgtaatgatagctcagaaggattatgcaaggcttcgtaagggagaacgcatatacccacttctgtgcatactgttgagctgaaaaactgacgaattatgataaactccagccaactttatttcatatcattgagggcctgtggctgatggcacagctatatttctactattccgcaatgaatgcgggtaagtctacagcattgttgcaatcttcatacaattaccaggaacgcggcatgcgcactgtcgtatatacggcagaaattgatgatcgctttggtgccgggaaagtcagttcgcgtataggtttgtcatcgcctgcaaaattatttaaccaaaattcatcattatttgatgagattcgtgcggaacatgaacagcaggcaattcattgcgtactggttgatgaatgccagtttttaaccagacaacaagtatatgaattatcggaggttgtcgatcaactcgatatacccgtactttgttatggtttacgtaccgattttcgaggtgaattatttattggcagccaatacttactggcatggtccgacaaactggttgaattaaaaaccatctgtttttgtggccgtaaagcaagcatggtgctgcgtcttgatcaagcaggcagaccttataacgaaggtgagcaggtggtaattggtggtaatgaacgatacgtttctgtatgccgtaaacactataaagaggcgttacaagtcgactcattaacggctattcaggaaaggcatcgccacgattaataagaatttctttactgacagggtgagcagggcacttttatcctgtcagttcgttttacgcacttcttccgggctatatacccttctcggcagttttttaacgccgctatacgcctcacagggctcttaagcaccgacgttgacttgtgacctgtaaagtacaatatccctgtgtttaggcgttatacatcgtcgcaaatatgatgaaggctaatgctgtcggtttatggaaaagttgctttgggtaaacaaaaaatacggccccagaagggcaatgccgttcacttaagaggagcggcactatgtttcacaggataacgggtttttgatatcttaaccgacctcggccttgatggtcgggggcgttttgttatgaacaccacttccagagcaccccgaagatgctccagtcgtttcgggatggtccctggtgacgccgtgtttcccagctctatcatttctgatgcgatattcttccacgcaggcagtagccagtggcggttacaacccttctggttcagcgtcagcagcaggtcttcgctgtaaaaaagtttatcaaacaacgtaatagagttatccgggatggtggcgagcatggagtgggccagcacagtttcgctctgccggtaaggtgcggtcacggcattcagcagaatgtgacttcccaggttcattaaggccaccagacgcataaccgggtaggcgttctgccgcttagtggatgtgttggcagacccataatattcacgcagctcgggtttatcaggtgtcctgaactgtgcgccatcaatggcaaaaagttgcaggccgtgccagtcatccttcaggtaacgttccgcgcccctgtctgtgcggtctggcggaagagccattccactggggcggcccccacgcgctgacgcgcctgggtgacagcgctgcgggccagcaggttcatccccgcttcgccatccgcgctcaggttcagacggcgaacaacatcggtaattggctcattgcaccaccatccagataaccatgtcccccggtaaacgacggcggcgaacggtcgcatgagcagaaagcgtcaggcagtgttgtatccactcggtgggaaggtgttctgcaaatagttgtgcagagggcggaggcataagcggatggtcactgaaatcgagcagatcattgagaagtggcataagaaaacggctccctgttgtggaagccgttatagtgcctcagtttaaggatcggtcaactaatccttaactgatcggcattgcccagaaggggccgtttatgttgccagacagcgctactgattaagcggattttttcgcttttttctcagctttagccggagcagcttctttcttcgctgcagtttcaccttctacataatcacgaccgtagtaggtatccagcagaatctgtttcagctcggagatcagcgggtaacgcgggttagcgccggtgcactggtcatcgaatgcatcttcagacagtttatccacgttcgccaggaagtctgcttcctgaacgccagcttcacggatagatttcggaatacccagttcagctttcagcgtttccagccatgccagcagtttctcgatcttagcagcagtacggtcgcccggtgcgctcagacccaagtggtcggcaatttcagcataacgacggcgagcctgcggacggtcatactggctgaatgcagtctgcttggtcgggttgtcgttcgcattgtagcgaataacgttacaaatcagcagggcgtttgccagaccgtgcggaatatggaactgggaacccagtttgtgcgccattgagtgacatacacccaggaaggcgttcgcaaacgcgatacccgcgatagtcgctgcactgtgaacacgttcacgcgctaccggatttttagacccttcgtggtaggacgctggcagatattctttcagcagtttcagtgcctgcagagcctgaccatcagagaactcagatgccagtacagaaacataagcttccatggcgtgagttactgcgtccagaccaccgaaagcacacagggacttcggcatgtccataaccaggttggcgtcgacaatcgccatatccggagtcagcgcatagtctgccagcggatatttctgaccagtagcgtcgtcagttacaaccgcaaacggagtgacttcagaacctgtaccagaagtggtggtgacagcgatcattttcgctttcacgcccattttcgggaacttgtagatacgtttacggatatccataaagcgcagcgccagctcttcgaagtgagtttccggatgttcgtacataacccacatgatcttcgcggcgtccatcggggaaccaccacccagcgcgataatcacgtctggtttgaaggagtttgccagttctgcacctttacgaacgatgctcagggtcgggtccgcttctacttcgaagaagacttcagtttcaacgcctgctgctttcagtacggaagtgatctgatcagcataaccattgttgaacaggaagcggtcagtcacgatgagcgcacgtttgtggccatcagtaatcacttcatccagcgcgattggcagggagccacggcggaagtagatagatttcggaagtttgtgccacaacatgttttcagctcgcttagcaacggttttcttgttgatcaggtgtttcggaccaacgttttcagagatggagttaccaccccaagaaccacaacccagagtcagggaaggtgcgagtttgaagttatacaggtcaccgataccaccctgagacgctggggtgttaatcaggatacgcgccgttttcattttctgaccgaagtaagaaacgcgagccggttggttatcctggtcagtgtacaggcaagaggtatgaccgataccgcccatagcaaccagtttctctgctttttctaccgcgtcttcgaaatctttagcgcggtacattgccagagtcggggacagtttttcatgtgcgaacggttcgctttcatcaacaacggtcacttcaccgatcagaatcttggtgttttctggtacagagaagcctgccagttcagcaattttataggctggctgaccaacgatagccgcgttcagcgcaccgtttttcaggataacatcctgaacagctttcagctctttaccctgcaacagatagccgccgtgggttgcaaaacgttcacgtacagcgtcataaacagagtcaacaacaacaacagactgttcagaagcacagattacgccgttgtcgaaggttttggacatcagtacagatgcaactgcacgtttgatatcagcagtttcatcgataacaactggagtgttgcccgcgcctacaccgatagctggtttaccggagctgtatgcggctttaaccatgcccggaccaccagtcgcgaggatcaggttgatgtctgggtggtgcatcagtgcgttagacagttcaacagaaggttgatcgatccagccgatcagatctttcggagcaccggcagcgatagcagcctgcagaacgatatcagccgctttgttggtggcatcttttgcacgcgggtgcggggagaagataatggcgttacgggtcttcagactgatcagcgatttgaagatagcagttgaagtcgggttagtggtcggaacgataccgcaaataataccgattggttcagcgatagtgatggtaccaaaagtgtcgtcttcagacagaacaccacaggttttttcatctttataggcgttgtagatatattcagaagcaaagtggtttttgatcactttatcttcgacgatacccatgccggattcggcaacggccattttcgcgagtgggattcgagcatctgcagcagccagagcggcggcgcggaagattttgtctacttgctcttgagtgaaactggcatattcacgctgggctttttttacacgctctacgagtgcgttaagttcagcgacattagtaacagccataatgctctcctgataatgttaaacttttttagtaaatcatctgctcgaatacgagagtatagtcagtgcggtgatgatttgcttaacctatgaaaatcaaaagcttactcgcgctcacactcactgtgatttactaaaagagtttaaacattagagttattatctctaatgcgtcacttccaggtggcgtaagcaagattactcacttctgggtactgattacgtgatccaaatcaaatttttgcaaagctgacacctttcagcatcgcttttcgccattatagctaacagttaataaattgtagtatgatttggtggctacattagcatgttttgcacaactagataacaataacgaatgatagcaattttaagtagttaggaggtgaaaaatgctgtcaaaaggcgtattgtcagcgcgtcttttcaaccttatttatggctaacattatccggcttttgcttcggagctaaccgtgattcagaccttttttgattttcccgtttacttcaaatttttcatcgggttatttgcgctggtcaacccggtagggattattcccgtctttatcagcatgaccagttatcagacagcggcagcgcgaaacaaaactaaccttacagccaacctgtctgtggccattatcttgtggatctcgctttttctcggcgacacgattctacaactttttggtatatcaattgattcgttccgtatcgccgggggtatcctggtggtgacaatagcgatgtcgatgatcagcggcaagcttggcgaggataaacagaacaagcaagaaaaatcagaaaccgcggtacgtgaaagcattggtgtggtgccactggcgttgccgttgatggcggggccaggggcgatcagttctaccatcgtctggggtacgcgttatcacagcattagctatctgtttggtttctttgtggctattgcattgttcgctttatgttgttggggattgttccgcatggcaccgtggctggtacgggttttacgccagaccggcatcaacgtgattacgcgtattatggggctattgctgatggcattggggattgaatttatcgttactggtattaaggggattttccccggcctgcttaattaattcctttcaaatgaaacggagctgccatgctccgtttacttcgtcattatttttactttgttcccgcgcagttatcaaaagcaaaaggaataggtaaaaatattcttctcaaattacagttagttataaggatttccttaactgcttctcctcaccatcatgttattttcgccacatcataatcctgggcttgctgaagaataattgaaatgatattagactggccccctgaatctccagacaaccaatatcacttaaataagtgatagtcttaatactagtttttagactagtcattggagaacagatgattgatgtcttagggccggagaaacgcagacggcgtaccacacaggaaaagatcgcaattgttcagcagagctttgaaccggggatgacggtctccctcgttgcccggcaacatggtgtagcagccagccagttatttctctggcgtaagcaataccaggaaggaagtcttactgctgtcgccgccggagaacaggttgttcctgcctctgaacttgctgccgccatgaagcagattaaagaactccagcgcctgctcggcaagaaaacgatggaaaatgaactcctcaaagaagccgttgaatatggacgggcaaaaaagtggatagcgcacgcgcccttattgcccggggatggggagtaagcttagtcagccgttgtctccgggtgtcgcgtgcgcagttgcacgtcattctcagacgaaccgatgactggatggatggccgccgcagtcgtcacactgatgatacggatgtgcttctccgtatacaccatgttatcggagagctgccaacgtatggttatcgtcgggtatgggcgctgcttcgcagacaggcagaacttgatggtatgcctgcgatcaatgccaaacgtgtttaccggatcatgcgccagaatgcgctgttgcttgagcgaaaacctgctgtaccgccatcgaaacgggcacatacaggcagagtggccgtgaaagaaagcaatcagcgatggtgctctgacgggttcgagttctgctgtgataacggagagagactgcgtgtcacgttcgcgctggactgctgtgatcgtgaggcactgcactgggcggtcactaccggcggcttcaacagtgaaacagtacaggacgtcatgctgggagcggtggaacgccgcttcggcaacgatcttccgtcgtctccagtggagtggctgacggataatggttcatgctaccgggctaatgaaacacgccagttcgcccggatgttgggacttgaaccgaagaacacggcggtgcggagtccggagagtaacggaatagcagagagcttcgtgaaaacgataaagcgtgactacatcagtatcatgcccaaaccagacgggttaacggcagcaaagaaccttgcagaggcgttcgagcattataacgaatggcatccgcatagtgcgctgggttatcgctcgccacgggaatatctgcggcagcgggcttgtaatgggttaagtgataacagatgtctggaaatataggggcaaatccagatattattaattccactgcctttggtagaggaaagtgctaaataataatcaattgttaaattattgtgcatttcactactggaactgtaatcagaaaagatagacatgcttagccaatctctatttgattgaattgaaagatgtttgttaaggcatggatgcaagctatagattctgatacggtcaataaaagagaattgcttaacaattttgcaaaatgtattggcgagtaagaaccgcatttggtactttccgggcaaccgccagacgattctttattggtaatgagaataattaacaattaaagagcgtcgcgaaagaataatgtgtctcgacaggggagacacagtacgaatcgacataaggtgatcgtctgaatcaccagaataaataaagtcggtgatagtaatacgtaacgataaagtaacctgacagcagaaagtctccgagcctgtgcagggtcccaatccgggattacacatgctggttaataccagtaattataatgagggagtccaaaaaacaatgaccaacatcaccaagagaagtttagtagcagctggcgttctggctgcgctaatggcagggaatgtcgcgctggcagctgatgtacccgcaggcgtcacactggcggaaaaacaaacactggtacgtaacaatggttcagaagttcagtcattagatccgcacaaaattgaaggtgttccggagtctaatatcagccgagacctgtttgaaggcttactggtcagcgatcttgacggtcatccagcacctggcgtcgctgaatcctgggataataaagacgcgaaagtctggaccttccatttgcgtaaagatgcgaaatggtctgatggcacgccagtcacagcacaagactttgtgtatagctggcaacgttctgttgatccgaacactgcttctccgtatgccagttatctgcaatatgggcatatcgccggtattgatgaaattcttgaagggaaaaaaccgattaccgatctcggcgtgaaagctattgatgatcacacattagaagtcaccttaagtgaacccgttccgtacttctataaattacttgttcacccatcaacttcaccggtgccaaaagccgctatcgagaaattcggcgaaaaatggacccagcctggtaatatcgtcaccaacggtgcctataccttaaaagattgggtcgtaaacgaacgaatcgttcttgaacgcagcccgacctactggaacaacgcgaaaaccgttattaaccaggtaacctatttgcctattgcttctgaagttaccgatgtcaaccgctaccgtagtggtgaaatcgacatgacgaataacagcatgccgatcgaattgttccagaagctgaaaaaagagatcccggacgaagttcacgttgatccatacctgtgcacttactattacgaaattaacaaccagaaaccgccattcaacgatgtgcgtgtgcgtaccgcactgaaactaggtatggaccgcgatatcattgttaataaagtgaaagcgcagggcaacatgcccgcctatggttacactccaccgtatactgatggcgcaaaattgactcagccagaatggtttggctggagccaggaaaaacgtaacgaagaagcgaaaaaactgctggctgaagcgggttataccgcagacaaaccgttgaccatcaacctgttgtataacacctccgatctgcataaaaagctggcgattgctgcctcttcattgtggaagaaaaacattggtgtaaacgtcaaactggttaaccaggagtggaaaacgttcctcgacacccgtcaccagggtacttttgatgtggcccgtgcaggctggtgtgctgactacaacgaaccaacttccttcctgaacaccatgctttcgaacagctcgatgaataccgcgcattataagagcccggcctttgacagcattatggcggaaacgctgaaagtgactgacgaggcgcagcgcacagctctgtacactaaagcagaacaacagctggataaggattcggccattgttcctgtttattactacgtgaatgcgcgtctggtgaaaccgtgggttggtggctataccggcaaagatccgctggataatacctatacccggaatatgtacattgtgaagcactaatggcaatacgtggggcaggagtgtcctgctccacggtgtctgatttttatcgcattacagaaggcacaggccagaaggtagggcaatgttaaaatttattctacgtcgctgtctggaagcgattccgacgctatttattcttattactatttcgttctttatgatgcgcctcgcgccgggaagcccttttaccggcgaacgtactttaccgccagaagtgatggccaatatcgaagcgaaatatcatcttaatgatccgatcatgacacagtatttcagctacctgaaacaactggcgcacggtgatttcggtccatcgtttaaatataaagattattcggtcaatgacttggttgcatccagttttcccgtttctgccaaactgggagccgcagcatttttccttgcggtaatactgggtgttagtgctggcgttattgccgcattaaaacaaaacaccaaatgggactataccgtgatggggctggcaatgaccggggttgttatccccagttttgtggttgcaccattattagtcatgatatttgcgatcattttgcattggctgccgggcggtggctggaatggtggggcgcttaaattcatgatattgccgatggtggcgttgtcactcgcttatatcgccagtattgcgcgtattacccgtggctctatgattgaagtattacactccaattttattcgtactgcccgggcgaaagggttacctatgcggcggatcattttacgtcacgcattaaaacctgctctgttacccgtgctctcttatatgggccccgcatttgtcggcattattaccggttctatggttatcgaaaccatttatggtttgccggggattggacaactgttcgttaatggcgcattgaaccgtgactattccttagtgttaagcctgaccatcctggttggtgctttaaccattttgtttaatgccattgtcgatgtgctatatgcggttatcgacccgaaaatccgttactgatactggagctcgcgatgatgttaagtaagaaaaacagcgagacgctggaaaatttcagtgaaaagctggaggtcgaagggcgcagcttgtggcaggacgcacgtcgacgttttatgcataaccgtgcggcggttgccagtctgatagtgctggtgctgatcgcgttatttgtaatcctggcaccgatgctttcccagtttgcctatgacgatactgactgggcgatgatgtccagcgccccggatatggagtccggtcactactttggtactgactcatccggtcgcgacctgcttgtgcgcgttgcgattggcgggcgtatctcactcatggtcggtgttgctgcggcactggtggctgtggtcgtcgggacactttatggttcgctttccggttatctgggcggtaaagtggattcggtaatgatgcgtctgctggaaatcctcaactccttcccattcatgttcttcgtcattttgctggtgacctttttcggtcaaaacatcctgctgattttcgtggcgataggcatggtttcctggctggatatggctcgtattgtgcgtgggcaaaccctgagtctgaagcgcaaagagtttattgaggcggcacaagttggcggtgtatcgacatcgggcattgttattcgccacattgtgccgaatgtactcggtgtggtggtggtctacgcatcacttctggtgcccagcatgatcctctttgaatctttccttagcttcctggggttgggtacgcaagagccgttaagcagctggggtgcattgctgagtgatggcgcgaactcgatggaagtctctccatggttattgttgttcccagcgggattcctcgtggtgacgctgttttgtttcaactttatcggcgatggcttgcgtgatgccctcgacccgaaagatcgttaaggagtgcagccatgagcgtaattgaaactgcaactgtgccgctcgcacaacaacaggctgacgcactgctgaacgtgaaagatttgcgtgtcacctttagtaccccggacggcgacgtcacggcggtcaatgatttgaatttttccctacgtgccggagaaacgctgggtattgtaggtgagtctggttcgggtaaatcgcaaactgcatttgcgttgatgggcctgttggctgccaacggacgtattggcggatcggcaaccttcaatgggcgtgaaatcctcaatttgccagagcatgaactcaataaactgcgcgctgaacaaatctcaatgatttttcaggacccaatgacttcgttgaatccctatatgcgcgtcggtgagcagttgatggaagtgctgatgctgcataagaacatgagcaaagctgaggcgtttgaagagtcggtgcggatgctcgatgcggtaaaaatgccggaagcgcgtaaacgcatgaaaatgtacccgcacgaattttctggcggcatgcgtcagcgagtcatgattgcgatggccttgttatgtcgacctaagctgctgattgcggatgaaccaacaactgcgctggacgtcaccgtacaggcgcagatcatgacgctattaaatgaactgaagcgggaatttaataccgccatcattatgatcacccacgatcttgtcgtggtggcggggatctgcgacaaagtgctggtaatgtacgccgggcgcacgatggaatatggcaacgcgcgcgatgtcttttatcaacccgttcatccttattctatcggtttgctcaacgcggtgccgcgtctcgatgcggaaggtgaaacaatgttgaccatcccgggtaatccgccaaacctgctgcgattaccgaaaggttgcccgttccagccacgttgtccgcatgcgatggaaatttgtagtagcgcaccgccgctggaagagtttacgcctggccgtctgcgtgcttgctttaaaccggtggaggaactgttatgaatgctgtaactgaaggaagaaaagtcctccttgaaatcgccgatcttaaagtgcactttgaaatcaaagatggcaaacagtggttctggcaaccgccgaaaacgctcaaagccgtcgatggtgtcactcttcgcctgtatgaaggggaaacattaggtgtggtaggggaatcgggatgcggtaagtccacctttgctcgcgccatcatcggtttggtcaaggcgaccgacggtcatgttgcctggttaggtaaagagttgctgggcatgaaacccgatgaatggcgtgccgttcgcagtgatattcagatgattttccaggatccgttggcatcgctaaacccgcgtatgaccatcggcgagatcatcgctgaaccactgcgtacttatcatccgaaaatgtcacgccaggaagttcgcgagcgcgtgaaggcgatgatgctgaaagtcgggttattgcctaacctgattaaccgctatccgcatgagttctctggtgggcagtgccagcgtatcgggattgcgcgtgctcttattcttgaaccgaagctgattatctgtgatgagccggtgtcggcgctggacgtgtcaattcaggcacaggtggtcaacctgctccagcaattgcaacgtgagatgggattgtcattaatttttatcgctcatgacctggccgtggtaaaacacatttccgatcgtgtgttggtgatgtatctcggccatgcggtagaactggggacctatgatgaggtctaccacaatccactacatccttacaccagggcattgatgtcggcagtccccatacctgatccggatctggagaagaacaaaaccatccagttactggaaggggaattaccgtcgccgatcaacccgccttccggttgtgttttccgtacccgttgcccgattgccggtccagagtgcgccaaaacacgtcctgttctggaggggagtttcagacactccgtttcttgcctgaaagtcgatccgctttaaaaacaataagggctgacagttgtcagccctttttcacgctaaaagcgattatttattcccgccagatgatatggcaaagtttgtgatctttttcgcggcataacagaatgcgggcaaaaacatcgttgatttcaccatcttcactgtccgccagaccaatcaccacttcggcaaaaaagtccgggttcaaatcgaaatcaacatgttcctgccagtcttccgccggatcgaataactccgcgccgccgcgctcttcaaactgaagattgaacagcagaacatcagctggatcgagattgtcggcagccagttcgagaaaaatatcgtaggcctgttcaagcgtttcatcttcagtcaggcgattgtttagatccatatccatagttactacctgtttaacctctgttggcgacgttttacagcaacggactgaagaagtaaaacagtcgctcggcgacacgttgccataatggacgttttagccataaacgggcatcgagcagacgtgaacgcgaaatataatcgtcctgaacggcggcgaggtcagcaccaaaacctttatcgtcgattgccagggtaatctcgaaatttagccacagactacgcatatcaaggttaactgtgccaaccagacttagttcgccatcgaccagcacgctcttggtatgcagtaacccgccttcaaactgataaattttaaccccagcagccagcagttccgtaaagaatgcgcgactggcccagccgaccagcatcgagtcattttttcgcggaaggataatactgacatccaccccgcgctgcgccgccgtgcaaatcgcatgaagtaaatcatcgcttggcacaaagtagggcgtggtcatgatcaaatattcacgcgccgaataagccgcagtcaataatgcctggtgaatgagatcttccggaaagccggggccagaagcaattgtgtgaatggtgtgaccgctggcctgttcaaacggcataatattgacatctggtggtggcggcagaatacgttttccggtttcaatctcccagtcgcaggaataaataatccccatcgcggtggcgatagggccttccatacgcgccatcagatcaatccattgccctacgcccgcatcttgtttgaagtagcgaggatcgaccatattcatgctgccggtgtacgcgatgtaattatcgatcatgatcatcttgcgatgttggcgcaggtccatacggcgtaaaaacacacgcatcagattgacctttaaggcttcgaccacttcaataccggcattacgcattagctcgggccacgggctgcggaaaaaagccacactcccggcggagtcgagcatcaatcggcaatgaatgccgcgtcgcgcagccgccattaatgattcagccacctggtccgccatgccgccgggctgccagatataaaacaccatctcaatattatggcgcgcgagctggatgtcgcggattaacgcctgcatcacatcatctgactcggtcatcagttgtagctgattccctttgaccccagcgatcccctgacgacgctcgcaaagcttgaataatggcgcagcgacactgctattttcttcggcgaagatatgcttacaggctttaaggtcgttaagccattttgcggtggaaggccacatcgctctggcgcgctcagcgcggcgtttgcctaaatggagctcgccaacggcaagataggcaataattccgactaacggcagaatgtaaataatcaacagccaggccatcgcggagggaactgcgcgtcgtttcattagaatgcgtaaagttacgcctgcaatgagcaaccagtatcccagaatggccaaccaactcaccaacgtataaacggttgtcatagattagaaatccttttgaaagcgcattgttatgagtttacgcatatggattcatctggcaaataaaaacgcgggaaaagcactggtcagcgtcgggggtgggggtataatgaccattctgttattgcatagagtagttaacatgaagcggagtagaacggaagtggggcgctggcgcatgcagcgtcaggctagccgacgtaaatcgcgttggcttgaggggcaatcgcgccgaaatatgcgtatccacagcatcaggaagtgcattctaaacaaacagcgtaactcgttattgtttgcgatctacaatatctaaatgtactgggcaccattgcggtgcccaataagtttactcttccgtctttaaactctatttttgcgccgattctttactgtcagctttcgtttctagttcatcgttatcgctgaaaataccatgacctgagttcaacaacattgaaacgagcatatcattattaatctcttcaccatttaaaactcgcgccagaatttcgctgccaaacagttgcggtgagagaatgatatccggatgtaccatcttaatcttattcaggtttttgctatcactgacggcgagaactgttttgacatcactgctcatatcttttgccgagagtacaacaaacgcgttatctgcatcgttatcactcagcgccagaatggcccggcaacgatcgattcccgctttctttaatacagaactgtcattactgtcaccggggataacatcagcattatcgcctaagcgttgctcaagttgcttgatatcatcttcaggcaagttgctgataaccgttacgttttgtccgcgttgattcagttgcaggatcgtattgatggcgagaatcgaatgtccgcaaacaataaaatgatctttacgatgcattgtatgattgtttccttttacaagtttgttgaatcccccgcggataagcggaccaaaaattgaggtcatagatgtggcaaaaacggtaatgccggaaataatgaccgaaatagtgaacaatcgtgctgattcagaaacagggacaatatcgccatagccgacggttgacatggtttctatcgaaaaatagaacgcggtcatcaaactttctattcgcggattaaaaccttcgcttaaataaagcgcaccgtaggttgagtaaaacagtaatgtcgtgaaactaataaatgcaaaaattgtcccggctgcggcgctactgtgggagaagtctttgcgcagtatcagcaaaaacaccagcgtaaaaatgcaaaatccaatactaaatttcagccagggataaaaatgcagggtgtaaattagcgctatcaacaacaaaatgatactgattgcccatgcgagctttgcccggaacagtaagccaatggagttcaggacaagaaagacgccgagcataaagagtggggcgtttgccagcaaggagagatccaactctgaaaatgctttgatatggaaaatatcaagcaaattgaccgacataccatagattgttttaaaaataagcaatccatttaaaaagacggccagcgcgagaatgtcgtgccgaagggtcacccataaatttgttgctgtttgtttgaatgtagcccagtgactcactgatacctctgtaaccacaattttgtttaattatcttagcgtgcacattttctgaacatacatgcagcgcgtgaatgtgttaaacaatagtagatgactttatccgcagtaatcaaaggatttgagcgagcaactgtacctcaggaaaggtcatttttcctgaatatgctcacatcatataaagaaatacagataaagttattatctgcttgtggtggtgaatgcactgaccggctataaggaaaggccaaacaagaacacggttgcaaaaaccgtgcccttaaatattgaatctctattcagaacactttcttaaatggtttcactgaaacgtgttcatagactcctgccgctacgtacgggtcagcatcggcccaggcctgagctgcttccagcgattcaaattcagcaataacggttgagccagtaaatcccgcagcccctggatcgttactgtctaccgctggcattggaccagctgtcaacaaacgaccttcatcatgcagtaactgtaaacgtgctaaatgtgccggacgaacggaaaggcgtttttcgaggctatcagctttgtcttgagcgtaaataacatacaacacgggcacaactccttgttcgggaaagttgtaaagtacgttatttgaaagggcgaagatctgcaacggaaagatgatgtctttgttaaggccatgcataaagtaagggtaattacgccaaaaatgacattttcactgatcctgatcgtcttgccttattgaatatgattgctatttgcatttaaaatcgagacctggtttttctactgaaatgattatgacttcaatgacccttgatttacctcgccgcttcccctggccgacgttactttcggtctgcattcatggtgctgttgtggcgggtctgctctatacctcggtacatcaggttattgaactacctgcgcctgcgcagccgatttctgtcacgatggttacgcctgctgatctcgaaccgccacaagccgttcagccgccaccggagccggtggtagagccagaaccggaacctgagccgatccccgaaccgccaaaagaagcaccggtggtcattgaaaagccgaagccgaaacctaagccaaaaccgaagccggtgaaaaaggtacaggagcagccaaaacgcgatgtcaaacccgtagagtcgcgtccggcatcaccgtttgaaaatacggcaccggcacgcctgacatcaagtacagcaacggctgcaaccagcaagccggttaccagtgtggcttcaggaccacgcgcattaagccgtaatcagccgcagtatccggcacgagcacaggcattgcgcattgaagggcaggttaaagttaaatttgacgttacgccggatggtcgcgtggataacgtacaaatcctctcagccaagcctgcgaacatgtttgagcgtgaggtgaaaaatgcgatgcgcagatggcgttatgagccgggtaagccaggcagtgggattgtggtgaatatcctgtttaaaattaacggcaccaccgaaattcagtaagcagaaagtcaaaagcctccgaccggaggcttttgactattactcaacaggtaaggcgcgaggttttccttcaggatcaaccgcgacatacttaaataatgcttctgtcgctttatagcgttgcccaattggttcagacgctacttttttcacccacacttcaatattaatgctgaccgatgtcgtccctttctggacacagcgtgcatagcagcacaccacatcgccgaccgcaaccggccgtaagaaagtcattccttcaacccgcacagtcactacgcgaccgtgggcaatttcttttgccagaatagcgccgccaatatccatttgtgacattaaccaaccaccaaagatgtcaccattggcattggtatcggcgggcatggctaaagtacgtaaaacaagatcgccctgagggacgttatgtgttgtagacatggtaaaaccgacttaaaaggaaaatcacaggcgcgatgctactatgattttcctgaggagaacagaggagatacagcgccagccccgaaggactggcagtctggttaggatttatcttcctgcggcatgtggcggtagatatagataccgcttaacaatgtgaagattaaggtaagggcggtcaggccaaagactttaaagttgacccaaatattttgcggcagccagaatgcgatgtagatgtttgccagaccgcaaaggataaagaaaacagcccaggccagattcagcttcgaccataccggttgcggcagcgtgagttctttacccagcatccgctgaattagcggctttttcatcacccattggctgactaacagggctcccgcaaatagagcataaatgacagtaaccttccatttaataaactcatcattgtggaagaacagcgtcaagccaccgaagacgaccaccagaacaaaagtgatcagggccatcttctcaaccttacgaaagcgaacccagctatagataagcacaatcgccgtggcgacgatcagcgccgcagtagccgcatagatgtcataaatcttgtaaaacgcgaaaaagacaaccagcggtaaaaaatcaagaaactgcttcattttacgattccgtaatcaaatgcttaaggttattggcgaatcaacatatacaggcggaacagatagatgagcaatatggctgaaatcaggttgctcaaggtgttcgccagtacggcaccaatttccggggttaatgcggcaaaagaagaggcaaaaagcagcaacagtgtttttgccagcaaccagctcagtactgcgggtgccaccagacgcatattcgcccaagtcagccgcatactgctacgcatcgaggcaaaaacgcccattttgtcctgtaccaacatcaccggtgccagggccagtaaaatggccatgataattcccggaacgaccaccagcatgatgccaatctgtactaaaagggtagtcagaaaaatcagaataaataactttggcaatatcggcgcactggcaccaatagctcgcagcgcactgactctctgacccgcagacaccagctggataattaatattacgcctccggcgagaatggcgttaccgattaatcctgaaaaagtggacgccgctgaagcctgcagcaaaatttgttgctgttccggtgacatattctgaaccaggtcgaacaacccactactgccgctaacgggcacgccgtcattgagctgcgcaagctgtgcatcactgggtgagaaaacatgccctaacaccactgtgataaacgcacatagcaacgataccaacagaatggtcataaattgattacggaagaaatttccggtgtcacggtatacggactgcgccgtgatagacatgcactctccttgagttttatgcaggtgttaattagcgggcaattgtaccctggttaagcctcgggtggcagcatcaggtcttgtatggaaaagcatatctttgtaaagcggaggtaattgctggccttcaggcatgggcaaatcgcggcaagtggcgaccgagttaatatttgcgtagcgaaaatatttaaaaattgatttaaatcacattaaccaggattctcaatgcaacttctaaattaatccagatcaataaagggtgaattatcatatgtaatgtgatctatgtaggatcatttgttactccaatgtaggtatattcgtcacgtttttataaccataacgacggagcggatatgaaaaagttaacagtggcggctttggcagtaacaactcttctctctggcagtgcctttgcgcatgaagcaggcgaattttttatgcgtgcaggttctgcaaccgtacgtccaacagaaggtgctggtggtacgttaggaagtctgggtggattcagcgtgaccaataacacgcaactgggccttacgtttacttatatggcgaccgacaacattggtgtggaattactggcagcgacgccgttccgccataaaatcggcacccgggcgaccggcgatattgcaaccgttcatcatctgccaccaacactgatggcgcagtggtattttggtgatgccagcagcaaattccgtccttacgttggggcaggtattaactacaccaccttctttgataatggatttaacgatcatggcaaagaggcagggctttccgatctcagtctgaaagattcctggggagctgccgggcaggtgggggttgattatctgattaaccgtgactggttggttaacatgtcagtgtggtacatggatatcgataccaccgccaattataagctgggcggtgcacagcaacacgatagcgtacgcctcgatccgtgggtgtttatgttctcagcaggatatcgtttttaattccgcacaaaaacgaccccgtaatatacggggtcaataaggacatggtataaagggtattatttcttcgcttctacgccatcagtttcagagcgaattaaaaatttctcagttgtttgcggaatattctgaatcagccagtcggccatttgcttttcctcatttaaaatcgcttcgatggttggaattgaagctgtatcaccggcattttttgctgctgctaatagtgaggtgtaacaggcgatttcaaattgctcgaagacatatccgctaatagagcctttgactatttcatcagaagggaatataccaccgattgactgcccaagcgcagccattttactcatggaatctttaatgactgaacgtgaaatgtcattacgatcaagaatagtttccagttgaacaatctggtttttggtttcactaagatgttgttcaatacgagcgcgtagttcaggataattatctatacggctggccatggattcaagcatagattcggcttgcttttccattgcgtgggcgtcacgtaaccagtcatgataatgttcaatacgattcatgaaaatgtcctctttataaaatgactaaaagttaaaattcatatttcaggctttattttcggctttcttatttacgttattaatggccagatcagtcagtttgatgtcggtggccttttcttcttccagggtttctttcagaagcttcgctgctttacggtaacctaattgttcagccagcgtcgctaatgtcccgtaactggcaatctcataatgctcgactttctgtgctgcggcaatcagtgcggcatcacgcacttcgtttttctcggtactttcgatgacctcattagcttcttcaataagaccttccattgccacacatttcatgcgcttaattttcaggttcgattcggactccacaacttgatcaatacgttcaatctgtccatgagtttcctcgaggtgcgcatgaaaagcctgacttaatttttcatttgatgttgctcttgcgagttttgccagtgcccgggttaattgtttttctgcgctgtaggtatctgaaagcaggtgaataaatacatcttcaatggtcttcatattcatatttttctccagtgaaatcactgcgagccatacggcccgcagatgcaattatctttatcagctgatattaataattaacggtgaatcaggatttgcctgatttattaccaccgctttgttgaccgccttttttacccgcttcagatgcgcgttgcggatcatttttaaaattaccgccgctatgctgaccgcctttacggcctgcgtcggatgccttctcacggtcttcggcgaaatttcctgaaccaccacgatgttcggccatgttatttctcccgttgcgttgcattgtttcattaatatgagtgttgtgtgtcgacactcattaaaattagtcgctaatgagaattagtcaaattaagcgcaacgagaagatagagggaaaatatattttgaggaacattctggatatattaacaattacctgaggaataagtgacttagagaaaattattgattttactggtgttatgttgcgggattaatttgtttgattatattactgttgggcggaaaaatgacgtaagttgacgttcgaccggggtaagcgaaacggtaaaaagataaatattaaatgaatttaggatttttccggcttcattaaagaaagttaaaatgccgccagcggaactggcggctgtgggattaactgcgcgtcgccgctttcatcggttgtacaaaaactttcagtgccgccagcattttctctggctcattaatatgttgctcgatgattttaacaatggccgaaccagaaatcgcgcccgcagctcctgcatcaatcgctgcttttacctgatccggggcggaaataccaaatccctgcaatggaggtgcagcgttgtactctttcagcttcgcaaccagatgattgaggggtaacgcggcgcggttttctgcgccggtcacgcctgctcgtgacagcaaataggtgtaaccacgaccgtaagaggctatctggcgcagcaggtcgtcatcggcatttggcgggcagatgaagataggtgcgacattatgacgcaacgcggcctggcggaagggcgcggactcttcaactggcacatcggcaaccagcaccgaatcgacgccgactttttcgcactgggcataaaactcatcaatgcctttgttaaacaccagattggcatacatcaacaggccaatgggaatggtcgggtgtttctggcgaatcagtgccagcatttcaaaacattgtgccggagtcacacctgccgcaaaggcgcgcagagtggcgttttgaatcgtcgggccatccgccagtgggtcggagaaggggatacctaactccagcgcgtcagcaccggcttcaattagcgtatcgataattttcaatgactgctcaatgcccggatcaccgagcgtgacgaaaggaacgaatgcgccttctttgcgctccttcaactgggcaaacagagattcgtagcgttccatcagatttcccctcgtgctttcaaaatatcgtgaacggtgaagatgtctttatcgccgcgaccggaaaggttaaccaccagtagctgctctttatccgggttttcgcgcatcattttcaacgcatgggccagggcgtgggaggattccagcgccgggatgatcccttcgtgcaggcacagcgttttgaaggcttcaagggcttcatcatcggtaatagacacgtaatcagcgcgtccagtgctgttaagatacgcgtgttgtgggccgacagacgggaaatccagtccggcggagatggagtaagattcttcaatctgcccgtcttcggtttgcatcatcggcgctttcataccgaaatagatacccacgcgaccatgttttagcggtgcgccgtgctcgccagtttcgataccgtgaccacctggctccacaccaatcaggccgacgttggtttcattgatgaaatcagcaaacatgccgatggcattcgaaccgccgccaacacaggcgataacggcatccggcaggcgaccttctctttccagaatctgcgctttggtttcttcgccaatcatccgctgaaactcacgcacaatggtcggataaggatgcgggccagctgcggtgcccagcatatagtgcgcggtttcgtaactaccggaccagtcgcgcagcgcctcgttacaggcatctttcagcgtcgcggaaccgctatgcaccgggatcacttccgcacccattaagcgcatacgaaaaacgttaggcgactggcgttcaacgtctttggcacccatataaatacggcatttcaggccgagcagggcgctggcaagggccgacgccacgccatgctgaccggcaccggtttcggcgatgatttcggttttacccatccgcttcgccagcaacgcctgccccagcacctggttagttttatgcgcgccgccgtgcagcaaatcttcacgcttgagatacagcgtggtgttcgtcccggctgtaatgttctggcatttggtcagcgcggttggacgcccggcatagtttttcagcaggtcgttgaactgagcctgaaattcaggatctttttgcgcactgacaaaagcttcttccagctggcgcagagcaggcatcaggatttgtggcacgtacatgccgccaaactcaccaaaataggggttaagtaatgttgtcattgttcctttccttaatatgcgcgcagcgtctggaaaaccgaggccaaaagacgtgcgtctttgatgcccggttgcgactctacagcagaattaaaatcaagtccggcgcagccggtttgtgccgcttccacgcagttatctgcgcctaagccccccgccagcagaacgttgccaagcgattgaccatttaatagtgaccagtcaaaacgttgcccgcttccaccctggccgttgtctaaaacatatttatcaacgtgctgaaactcgcgggcgggcagggtttcaccgacgcttaatgctttccagatggcaacatgtgctggcagagcttcacgcagcgtatcgatatacagctgttcttcattaccatgcagttgcactgccgccagcgataacaccttagctttgtccaccacatcggcaatatcgtgattgcggaacacgccaacatactgcaacggtgccgcagccatcacttcctgcgcctgttcaacgttgacgcaacgcggtgatgtcgcaacaaaaatcaacccaccgtaaatcgcgcccgcgtcataagctgctttagcatcttgcccacgcgtcaggccacatactttattctcacccagcaacacccggcgcacggcggcgtgcaaatcgtcatgggccatcaacgccgaaccaatcagaaaaccgttagcgaagtggcttaactcgcgcacctgagcgtaagtattgatgccggattcgctgattaccgtcacgttgtgccccagtttcggcgcaagctcgcgggtacggttgagatcaatcgacaaatcacgcagatcgcggttgttgatgccaacgacctttgctcccaatgcaatggcgcgctcctgttcctcttcattactgacttcggtcagcacccccatctccagactgtgagcgacggcggcaagctggcgatattggtcgtcatccagtactgaaagcattaataagcaggcatcggcctggtaatagcgcgccagatagatctggtaagggtcgataatgaagtctttacataaaatcggctgcggggcgatttggctgacgatggggaggaaattaaagctcccctgaaaatatttctcatcagtcagcaccgaaattgccgaagcgtaatgtttataaatggcggcaatgcgtgctggatcgaaatcatcacggatcacgccttttgacggcgacgctttcttgcactccagaataaacgccgtgcgcgcaccctgtagcgcatcataaaaatgtcgcgtgctcggctgaacctcattctgaaaactggccagcggttgctgctgtttgcgggcttctacccaaatcgccttgtctgcgacgattttcgctaaaacggtttgcatcatttaccctcgtgccgccagtgcggtgactctgtcgtaagcggaaccactgcgcagtacctcaagaacggtttgcgcattggcttgcagatcttcatggccatgcaggcgcattaacatggcgacgttcgcagcgacggctgcttcatgggcggcgtcgcctttaccttgtaacaaacgtgttaaaatgtcacggttttcttccggtgttccgcctgccagttgctcctggtggtagggtgtcaggccaaagtcttctgcggtgagctgatagcttttaatttcgccgtcatgcagttcggcaacgattgtcggcgcgtgtaatgaaacttcatccatcccgccgctgtgcaccaccgccgcgcgttgataccccagcacgcgcaaggtttcggcaatcggcagcaccagttccggactataaacaccaattaacgccagcggcggatgcgccgggttaatcaatggccccagcacattgaacagggtgcgggttttcagttgctggcgaaccggcatcgcgtggcggaatccggtgtgatacttcggcgcaaagaggaaacatacacctaactcatccagcgcctggcgcgatttatcggcgttcatatcaagattaataccgaacgccgccagcagatcggacgaaccagatttactggagacgctacggttgccgtgtttcgccactttcagcccacaggccgcggcgacaaacgcactggcggtagaaatattgatactgttgctgccgtcaccgccagtaccgacgatatcagcaaacagataatccgggcgcgggaacggcgctgcgttttccagtagcgcggttgctgccccggcgatctcgttcgggtgctcaccgcgaattttcatgctcaccagcgccgccgccagttgttccggcttcagctcgccacgcaccaccgctgaaaacagctggtggctttcttgttggctaagcgtctgcgcctgatacagtttttccagaatcggttgcagcgtgttggctggctctagtttctgctgcgcccaggccagcgtttgttccagcaggcgagcgccctgggtggtgagaatggattccggatggaactggaatccacaaacgcgatccgcatcgtgacgtactgccatcaccatgccattaaaatgggcgttgatggttaaaccggccggaatgttactgccaaccagcgagtgataacgcgccaccggcagcgggtttgttaatccggcaaacatcgcctgaccgtcatgttcaatgctggaggctttaccgtggagaatttcgcccgcctgaccgacatagcccccgtaagcttcgacaatcgcctgatgtccgaggcaaatgccaataatgggcagcttgccacgcaagcgggtgaggagttccggcatacaaccggcttcgctcggcacaccggggccaggagaaagcatcagcaccggattgctcatggtcgccaggcgttcaattaaggtttgcgccggaatatggttgcggtaaatcaccacgttatgcccattgctgcgcaactgatctgccaggttgtacgtaaaagagtcgatattatcgagcagcagaatgtcagccatcagaaagtctcctgtgcatgatgcgcggtggcaatagcgcgcagtacagcgcgggctttgttacgggtttcgtcggcttccgactgcggaacagaatcaaggactacaccagcacccgcttgcacggtggcgataccgttttccaccagcgccgagcggatcacaatgcaggtgtcgagatcgccatgcgcggtgaaataacctaccgcgccgccgtagctgccgcggcgacgaccttccgcctcggcaattaactgcatagcgcgtactttcggcgcaccgcttaacgtccccatattcatacaggcgcgataagcgtgcagggcgtcaagatcgtgacgcagttcgccgactacgcgagagacgaggtgcatcacataggaataacggtcaactttggtgagatcggcgacgtagcggctgccgggggtgcaaatgcgtgccagatcattacgggcgagatcaaccagcatcagatgttcagacagctctttatgatcggtacgcatttccagttcaatacggctgtcgagatctctgtccagtgaaccatcggcgcgacgaccgcgtgggcgtgttccggcaatcgggtagatctcaatctggcggctggtggcatcatacttgagcgagctttccggcgacgcgccaaatagggtgaaatcattatcctgcataaaaaacatgtacgggctgggattactctttttcagcacgtaataggccgccagcggtgacgggcagggcagagagaaacggcgagatggcaccacctggaaaatttctccagcgcgaatcgctttttgcaacaaacgcactacgccaccgaactcttcatcgctctgattacattcacaacgcatatgcggcacggaaaccactggcagcggcggcgcggcttcggtcagttgctgacgtagttcgttcaggcgagcagtgagacgttgtttttcttcttcattcggagcaaacaggctggcctgaatacgggtgctttttttctgatggtcaatcaccatcagcgtttcagcgagataaaaacagaaatcagggcagttattttccgctgacagttgcggtaaatcttcaaatcccgccacaaggtcataagagaacaggccgccgaagaacatggcttctcgttcttccttcggtacattcaacagattctgcaataaacggaaagcgtcaaaaaccgaaagggagcataagcgggcgtcttcatccagcagtggactgacaggggggaagcgcagcacacggcagtttggtgattgttcactttccacacccgcaggcagggcgttatccagtagtgccaggagggcttcgccgttgccggaaagtgcctggattgtgacagtgtcacctaaagctgtaatgcgcagcgcactgtctaccagcagcaggctttttaaatcatctttgctgtcgatatctgcggattccagcagcagcgttgccggacgatccccacacaactggtgaaaaagcgcggtgggattgtcgcgataagcgccttcgcaggttagcagttcgagagtcggtttttgtgtttgcattgttattctctaattttgttcaaaaaaaagcccgctcattaggcgggctgggtatctgattgctttacgcatggtgaatacactgcccgtttcaggaagtgcgccaccaacctttcagtacgaaaattgctttcattgtcgataccctttttacgtgaacttgcgtactagttaactagttcgatgattaattgtcaacagctcatttcagaatatttgccagaaccgttatgatgtcggcgcaaaaaacattatccagaacgggagtgcgccttgagcgacacgaattatgcagtgatttacgacctgcacagccataccacagcttccgatggctgcctgacgccagaagcattggtgcaccgtgcagtcgagatgcgcgtcggcaccctggcgatcaccgaccatgacaccacagctgcaatcgcgccagcaagagaggaaatttcacgttcgggactggcgttgaatcttattcccggcgtggaaatttccacggtctgggaaaatcatgaaattcatattgtcgggctgaatattgatattactcatccgctaatgtgtgagttcctcgcgcagcagacagaacggcgcaatcagcgggcgcagctgattgccgaaagacttgaaaaagcgcaaatacctggggcgctggaaggcgcacaacgactggcgcagggcggcgcagtgacgcgcggtcattttgcgcgtttccttgttgagtgcggcaaagccagttcaatggcggatgtctttaaaaagtatctggcgcgcgggaaaaccggatacgttccgccacagtggtgtacaatagaacaagctattgatgtcattcatcattctggcggtaaggcggtgctagctcatcctgggcggtacaatcttagtgctaaatggctgaaaagattggttgcgcattttgccgaacaccacggtgacgcgatggaagtcgcgcagtgccagcaatcgcccaatgaacgtacccagctggcggcccttgcgcgtcagcatcatttatgggcatcacaaggatctgattttcatcagccatgcccgtggatcgaactgggtcgtaaactctggctgcccgcaggcgttgaaggcgtctggcagctatgggaacagccgcagaacaccacagagagggaattatgagccagtttttttatattcatcctgataacccacagcaacgtctgatcaaccaggcggtggagatcgtgcgtaaaggcggggtgattgtttatccaactgattccggctatgcgctcggctgtaaaattgaagataaaaacgcgatggagcgtatttgtcgtattcgccagctgccggacggtcacaactttaccctgatgtgtcgcgatctttctgaactctcgacctattcatttgttgataacgttgcgtttcgtttaatgaaaaacaacacgccgggcaactataccttcatcctgaaggggacgaaggaagtgccacgccgtctgttgcaggaaaaacgcaaaaccatcggtatgcgtgtgccttctaaccctatcgctcaggcgttacttgaagcattgggcgaaccgatgctttccacttcgctaatgctgccaggcagcgaatttaccgaatcggacccggaagaaattaaagatcgtctggaaaaacaggtagatttgattattcacggcggctatctcgggcagaaaccgacaacggttattgatcttaccgatgatacgccggtcgtggtgcgtgaaggcgtaggtgatgtgaagcctttcttataacaaattgcgttccacggatggaagactatggcagggaagtttcgctgcattttgctgttgatagcagggctgtttgtatcatctctaagttatgcagaaaacacggagatcccttcttatgaagaagggatctcgctctttgatgttgaagccactctgcaaccagatggggtgctcgacatcaaagaaaatattcattttcaggcgcgaaatcagcagattaagcacggcttttatcgtgatttaccacgactatggatgcagcctgatggggacgctgcactgctgaactatcatattgttggcgtcacccgtgatggtattcctgaaccctggcatcttgactggcatatcgggttaatgagtattgtcgtgggcgataaacaacgtttcttgcctcaaggcgactatcattatcaaattcattatcaggttaaaaatgctttcctgcgtgagggggattctgatctgctaatctggaacgtgaccggtaaccactggccgtttgaaatttataagacccgtttttctctccagttctctaatattgcgggtaatccatttagcgaaatcgatctttttaccggagaagagggcgacacatatcgtaatggccgcatccttgaggacggaagaattgaatcccgcgatccgttttatcgtgaagatttcacggtcctctaccgctggcctcacgctttacttagcaatgcctcggctccgcaaacgacgaatattttcagccatcttcttttaccctccacgtcatcgttgttaatttggtttccgtgtctgttcctggtttgtggatggttatatctctggaagcgcaggccgcaatttacgccggtagatgtgattgaaaccgatgtcattccgccagattacacgcccggcatgttacgtctcgatgcgaagctagtttacgacgataaaggtttttgtgccgatatcgtaaatctgattgtgaaaggaaaaattcatctggaagatcagtctgacaagaaccagcaaatcctgattcgtgttaatgaaggcgcgaccagaaataatgcggtattactgcccgcagagcagttattactggaagcgttatttcgtaaaggcgataaggtcgttcttacggggagacgcaacagagtcttacgcagggcatttttacggatgcagaaattttatctgccgcgtaaaaagtcttcgttttaccggtctgatacttttttgcaatggggtggactggcaatattggcggtcattctttacggtaacttgagtcctgtaggctgggcaggaatgagtctggtgggcgatatgtttattatgatctgctggattattccttttttattttgttcccttgagcttttgtttgcccgcgatgatgacaagccttgcgttaatcgtgtaatcatcactttgtttttaccactgatttgttcaggcgtggccttctattctctctacatcaatgtcggagatgtattcttttactggtatatgccagcgggttattttaccgctgtttgcctgaccggttatctcactggcatggggtatatttttctgccaaagtttacccaaactggacagcaacgttatgcccacggtgaagctatcgttaactatcttgcgcgtaaagaggcagcaacacacagtggacgtcggcggaaaggggaaacacggaaactggattacgcgttgctaggttgggctatatcggcaaatttggggagggaatgggcgttacgcattgccccttcgctttcttcggcgattcgcgctccagagattgcccgtaacggcgttttattctcattacagacgcacctaagttgcggggccaataccagtttgttggggcgaagttattccggtggtggtgctggcggcggcgcgggtggcggaggcggtggtggctggtaattaagctgatgttaatcgaaacaagctttaaccataaagatagtgtagtatgttgcgcctcaaagccaggccgataaacgtcgagtcgtttacttaaggcctgaagagttcaaacagactttactatcagtgagtcagatgtaagttctgactcactgttgcacaaaagcatatcagacgcctgggaaggcgacaccaaaaggaagctctatgagcgaaaagctacagaaagtgctggcgcgtgccggccacggttctcgccgtgaaatcgaatctattattgaagccggtcgtgtgagtgttgatggcaaaattgctaaactcggcgatcgtgttgaagttacccctggattgaaaatccgtatcgatggtcacctgatttcggtacgtgagtccgctgaacaaatttgtcgcgttctggcctattacaaaccggaaggtgagttgtgtacccgtaacgatccggaaggacgtccaacggtgtttgaccgtctgccaaaactgcgtggcgcacgctggattgccgtgggtcgcttggacgttaatacctgtggtctgctgctgttcaccaccgatggtgaactggcaaaccgtttaatgcacccaagccgtgaagttgaacgtgaatatgccgtgcgtgtatttggtcaggttgacgacgcgaaactgcgtgatttgagtcgtggcgtgcagttggaagatggtccggcagcttttaaaaccatcaagttcagcggcggcgaagggatcaaccagtggtacaacgtgactctgaccgaaggccgtaaccgtgaagttcgtcgtctgtgggaagcggttggtgtgcaggtgagccgcctgatccgtgttcgttacggtgatatcccactgccaaaaggtctgccacgcggtggctggacggagctggacctcgcccagactaactatctgcgcgaactggtggagctaccgccagaaaccagctctaaagtcgctgtagaaaaagaccgtcgtcgcatgaaggcgaatcagattcgtcgtgcggtgaaacgtcacagtcaggtgagcggcggtcgtcgttctggcggacgtaataataacggttaatcaaagtatgccggacgtcatatccggcatttttacagattaataatcgatccctatctgcgcttttacaccggcatcaaacgcatgtttgacggggcgtaattcacttaccgtatctgccagttcaagaatatcccgatgacaaccacgacccgtgataatcaccgtctgttgatgtggacgttcatttaacgcctgcaccacttcttccagtggcaaatagtcatacgccaccatatacgtcagttcatcaagcaaaaccatatccagtgaggaatcagcaagcatccgctttgcatgttgccagacttcgcggcaggcggcggtatcagactcgcggttttgtgtatcccaggtaaagcccgttgccatcacctgaaactcaacgccatgtggctccagcagattgcgttcgccattaggccaggtgcctttaataaactgcacgacgcctactttttttccgtgaccaactgcgcgtgttgccgtaccaaatgccgcggtggttttgccttttccattgccggtaaagacgatgataataccgcgttcatcctgggcctgggccacacgagcatctactttttctttcactcgctgctgacgctgttggtagcgttcatcactcattgggaaattcctggtttacggcccggttgggcgtcaaaggtcatgccggttttacggcggctgtcatcgcccatcagccagaggtagagcggcatgatatcagcgggtgttttaagtttctgtggatcttcggtcgggaaggcgctggcacgcattgcggtgcgcgtaccgcctgggttaatgcagttgacacgcaggcgctgctgatattcatcggccagtacctgcatcatcccttcggtggcaaatttcgacgctgcatatgcaccccagttggctcgtccctgacgtccaacgcttgatgaagtaaagaccagtgaaccggcgtccgatttgagtaataaaggaagcagtgcctgggtgagcataaaggtggcattaacgttgacctgcatgacgtcctgccagacctgcggattttgttcgctcattgggcaaacatcgccgagcaatccggcattatgcaaaacaccatccagacgcggataattaacggcaatgcgctgtgccagttgttggcaattttcggacgtgcaggtcagcaaatcgagaataaaccactgtggctgacgcccagtttcttcgtttatgtggctggctacctgacgtaatttttcttcattacggcccaacagaatcactgtcgcaccatagcgtgcatacgtcatcgcggcttcacgaccaataccatcgctggctcccgtcaccaggataatgcgatcattgagtaaatcttgttttggctggtaatgcatggctactcctcaacgacgttgtctgtcgcgctgccagtgtactttatgactttggggctttatgcctgaaacagaagggcatttcaatcagcctggggcgataacaccgcaaaatggatactttgtcatactttcgctgcaataacatctctgcgagacggcttaacatgcctgttgtaaactgtgagccaaagcgttgtttaaccaaggtggggactcgtggaattgttgtctgaatatggtttgtttttggcgaaaatcgttaccgttgtgctagcgattgcggcgattgccgccattattgtcaatgttgctcaacgtaataaacgccagcgtggcgagttacgggtcaacaatctcagcgaacagtataaggagatgaaagaagaactggccgcggcgctgatggactcacatcagcaaaaacagtggcacaaagcgcagaagaaaaagcataagcaagaagcgaaagcagcaaaagcgaaagccaaactgggcgaggtggcaactgacagtaaaccccgcgtctgggtgctggattttaaaggcagcatggacgcccatgaagtgaactcgctacgtgaagagataacggctgtactcgcagcattcaaaccgcaggatcaggttgtgctccgtctggaaagccctggtggcatggtgcatggttacgggctggcggcttcgcaactgcagcgtctgcgcgataaaaacattcctttaactgttacggtagacaaagtcgctgccagcggcggttacatgatggcctgtgtggcggacaaaattgtttccgcaccgtttgctattgtgggttccattggcgtggtggcgcaaatgcccaactttaaccgcttcctgaaaagcaaagatattgatatcgaactgcacactgccgggcagtataagcgcacgctgacgttgctgggtgaaaataccgaagaagggcgggagaaattccgcgaagagttgaacgaaacgcatcagttgtttaaagattttgtgaagcgtatgcgtccttctctggatattgaacaggtggcaacgggtgaacactggtacggacaacaggcggtagagaaaggcctggttgatgaaatcaacaccagtgatgaagttattcttagcctgatggaaggccgtgaagtggtcaatgtacgctatatgcagcgtaaacgactcattgaccgattcaccggcagcgcggcagagagcgccgatcgattgttgctacgctggtggcagcggggtcaaaagccattgatgtaaaagacaaacgcgaggctaagacctcgcgttttgctttaatcaaccagatgatatttttctgaaagcacatgggccaggtgtttgaacatattaaacaccgcggtgcttttggctgttggcaatccttgttcatctaaaaagtagtcgccggtaaataccagcacgccattacgctgcgtgacgccggtggcttcaatccctgcgagcgtatcctcatgctcacgaatgattttgttggcctctttcaacagcgtttcgcggtcgatgggttgtgtctctttgttcattatttactccttaaacaaggacattagtctacgccaggcatggcttgcagacaaatataccacgctggtggcaagagcgccttactggcaactttggattttgcatgctaataaagttgcgtatcggattttatcaggtacagtgtgacgctttcgtcaatctggcaatagatttgcttgacattcgaccaaaattccgtcgtgctatagcgcctgtaggccaagacctgttaactcagtcacctgaattttcgtgaacagagtcacgacaaggggttgatatccgcagagagcgagtccatatcggtaactcgttgccagtggaaggtttatcaacgtgcgacgcattcctggaagaatcaaattaggtaaggtgaatatgggtaaagctcttgtcatcgttgagtccccggcaaaagccaaaacgatcaacaagtatctgggtagtgactacgtggtgaaatccagcgtcggtcacatccgcgatttgccgaccagtggctcagctgccaaaaagagtgccgactctacctccaccaagacggctaaaaagcctaaaaaggatgaacgtggcgctctcgtcaaccgtatgggggttgacccgtggcacaattgggaggcgcactatgaagtgttgcctggtaaagagaaggtcgtctctgaactgaaacaactggctgaaaaagccgaccacatctatctcgcaaccgaccttgaccgcgaaggggaagccattgcatggcacctgcgggaagtgattgggggtgatgatgcgcgctatagccgagtggtgtttaacgaaattactaaaaacgcgatccgccaggcatttaacaaaccgggtgagctgaatattgatcgtgttaatgcccagcaggcgcgtcgctttatggaccgcgtggtggggtatatggtttcgccgctgctatggaaaaagatcgctcgtggcctgtctgccggtcgtgtgcagtcggtggcggttcgcctggtggtcgagcgtgagcgtgaaattaaagcgttcgtgccggaagagttctgggaagtcgatgccagcacgaccacgccatctggtgaagcgttggcgttacaggtgactcatcagaacgacaaaccgttccgtccggtcaacaaagaacaaactcaggctgcggtaagtctgctggaaaaagcgcgctacagcgtgctggaacgtgaagacaaaccgacaaccagtaaacctggcgctccttttattacctctacgctgcaacaagctgccagcacccgtcttggatttggcgtgaaaaaaaccatgatgatggcgcagcgtttgtatgaagcaggctatatcacttacatgcgtaccgactccactaacctgagtcaggacgcggtaaatatggttcgcggttatatcagcgataattttggtaagaaatatctgccggaaagtccgaatcagtacgccagcaaagaaaactcacaggaagcgcacgaagcgattcgtccttctgacgtcaatgtgatggcggaatcgctgaaggatatggaagcagatgcgcagaaactgtaccagttaatctggcgtcagttcgttgcctgccagatgaccccagcgaaatatgactccacgacgctgaccgttggtgcgggcgatttccgcctgaaagcacgcggtcgtattttgcgttttgatggctggacaaaagtgatgcctgcgttgcgtaaaggcgatgaagatcgcatcttaccagcagttaataaaggcgatgctctgacgctcgttgaacttacaccagcccagcactttaccaagccgccagcccgtttcagtgaagcatcgctggttaaagagctggaaaaacgcggtatcggtcgtccgtctacctatgcgtcgatcatttcgaccattcaggatcgtggctacgtgcgagtagaaaatcgtcgtttctatgcggaaaaaatgggcgaaatcgtcaccgatcgccttgaagaaaatttccgcgagttaatgaactacgactttaccgcgcagatggaaaacagcctcgaccaggtggcaaatcacgaagcagagtggaaagctgtactggatcacttcttctcggatttcacccagcagttagataaagctgaaaaagatccggaagagggtggtatgcgcccgaaccagatggttctgaccagcattgactgcccgacttgtggtcgcaaaatggggattcgcacagcgagcaccggggtattccttggctgttctggctatgcgctgccgccgaaagagcgttgcaaaaccaccattaacctggtgccggaaaacgaagtgctgaacgtgctggaaggcgaagatgctgaaaccaacgcgctgcgcgcaaaacgtcgttgcccgaaatgcggcacggcgatggacagctatctcatcgatccgaaacgtaagttgcatgtctgtggtaataacccaacctgcgacggttacgagatcgaagagggcgaattccgcattaaaggttatgacggcccgatcgttgagtgtgaaaaatgtggctctgaaatgcacctgaaaatggggcgtttcggtaaatacatggcctgcaccaacgaagagtgtaaaaacacacgtaagattttacgtaacggcgaagtggcaccaccgaaagaagatccggtgccattacctgagctgccgtgcgaaaaatcagatgcttatttcgtgctgcgtgacggtgctgccggtgtgttcctggctgccaacactttcccgaaatcgcgtgaaacgcgtgcgccactggtggaagagctttatcgcttccgcgaccgtctgccggaaaaactgcgttatctggccgatgcgccacagcaggatccggaaggtaataagaccatggttcgctttagccgtaaaaccaaacagcaatatgtctcttcggaaaaagacggaaaggcgactggctggtcagcattttatgttgatggcaaatgggttgaaggaaaaaaataacctttaattctgtcaggtttttataaacaaagggtcgcgaaagcggcccttttttattgcatattattttttcttcacacctatacactaaggctataaatgatatagtggttatagttagcaccttttttattattaaatcgtattagtcacccgccaggtgtgacgaaaaaacgatgttctgatggcgtctaagtggatggtttaacatgaaattacaacaacttcgctatattgttgaggtggtcaatcataacctgaatgtctcatcaacagcggaaggactttacacatcacaacccgggatcagtaaacaagtcagaatgctggaagacgagctaggcattcaaattttttcccgaagcggcaagcacctgacgcaggtaacgccagcagggcaagaaataattcgtatcgctcgcgaagtcctgtcgaaagtcgatgccataaaatcggttgccggagagcacacctggccggataaaggttcactgtatatcgccaccacgcatacccaggcacgctacgcattaccaaacgtcatcaaaggctttattgagcgttatcctcgcgtttctttgcatatgcaccagggctcgccgacacaaattgctgatgccgtctctaaaggcaatgctgatttcgctatcgccacagaagcgctgcatctgtatgaagatttagtgatgttaccgtgctaccactggaatcgggctattgtagtcactccggatcacccgctggcaggcaaaaaagccattaccattgaagaactggcgcaatatccgttggtgacatataccttcggctttaccggacgttcagaactggatactgcctttaatcgcgcagggttaacgccgcgtatcgttttcacggcaacggatgctgacgtcattaaaacttacgtccggttagggctgggggtaggggtcattgccagcatggcggtggatccggtcgccgatcccgaccttgtgcgtgttgatgctcacgatatcttcagccacagtacaaccaaaattggttttcgccgtagtactttcttgcgcagttatatgtatgatttcattcagcgttttgcaccgcatttaacgcgtgatgtcgttgatgcggctgtcgcattgcgctctaatgaagaaattgaggtcatgtttaaagatataaaactgccggaaaaataatttcttgcgttattttcggcaccttttatgtagcgaaggtgccggaatatattctcttttgttacttatttctataccgtgcacaatatttttatccctcatatttatagggtaaattacctgtaaagtagtgtctaattacccgcctcgcaaactccagttttcaaatatctatttcaggtcaaaagattgaattattcactggagacgattcgtaaattcgctggatttttgactaaagtttctttaggatttgtctcatcgtatgattaattacaccaatcgttcaacgtcttgctgataagtgatggcgattatatgaggttagcaatgccttctggaaatcaggaaccccgccgcgatcctgaattaaaacgtaaagcctggctggcggtttttcttggttctgcacttttctgggtggttgtcgcactgctgatttggaaagtgtggggataactatggtcggtcaggagcaactggagtcgtcaccattatgccagcatagtgacaatgaaacagaaacgaaacgggaatgttccgtcgttattccagacgactggcaactaacatcgcagcagcaagcctttatagaactgtttgctgaagatgatcagccgaaacaataattatcatcattcttattacccatttttaatgaattaaagggcttttaatacaccgcagcaataacagcttgagttatctcaacacaaaataataaccgttaagggtgtagcctatgatcaacacaaatatgaaatattggtcctggatgggcgcgttttctctgtcgatgctcttctgggccgaactcctctggatcattactcactgatccttgaccccgctgcggcggggttgtcatttgctttgccacaaggtttctcctcttttatcaatttgggttgttatcaaatcgttacgcgatgtttgtgttatctttaatattcaccctgaagagaatcagggcttcgcaaccctgtcattaaggaggagctatgtcgtcaaccctacgagaagccagtaaggacacgttgcaggccaaagataaaacttaccactactacagcctgccgcttgctgctaaatcactgggcgatatcacccgtctacccaagtcactcaaagttttgctcgaaaacctgctgcgctggcaggatggtaactcggttaccgaagaggatatccacgcgctggcaggatggctgaaaaatgcccatgctgaccgtgaaattgcctaccgcccggcaagggtgctgatgcaggactttaccggcgtacctgccgttgttgatctggcggcaatgcgcgaagcggttaaacgcctcggcggcgatactgcaaaggttaacccgctctcaccggtcgacctggtcattgaccactcggtgaccgtcgatcgttttggtgatgatgaggcatttgaagaaaacgtacgcctggaaatggagcgcaaccacgaacgttatgtgttcctgaaatggggaaagcaagcgttcagtcggtttagcgtcgtgccgccaggcacaggcatttgccatcaggttaacctcgaatatctcggcaaagcagtgtggagtgaattgcaggacggtgaatggattgcttatccggatacactcgttggtactgactcgcacaccaccatgatcaacggccttggcgtgctggggtggggcgttggtgggatcgaagcagaagccgcaatgttaggccagccggtttccatgcttatcccggatgtagtgggcttcaaacttaccggaaaattacgtgaaggtattaccgccacagacctggttctcactgttacccaaatgctgcgcaaacatggcgtggtggggaaattcgtcgaattttatggtgatggtctggattcactaccgttggcggatcgcgccaccattgccaatatgtcgccagaatatggtgccacctgtggcttcttcccaatcgatgctgtaaccctcgattacatgcgtttaagcgggcgcagcgaagatcaggtcgagttggtcgaaaaatatgccaaagcgcagggcatgtggcgtaacccgggcgatgaaccaatttttaccagtacgttagaactggatatgaatgacgttgaagcgagcctggcagggcctaaacgcccacaggatcgcgttgcactgcccgatgtaccaaaagcatttgccgccagtaacgaactggaagtgaatgccacgcataaagatcgccagccggtcgattatgttatgaacggacatcagtatcagttacctgatggcgctgtggtcattgctgcgataacctcgtgcaccaacacctctaacccaagtgtgctgatggccgcaggcttgctggcgaaaaaagccgtaactctgggcctcaagcggcaaccatgggtcaaagcgtcgctggcaccgggttcgaaagtcgtttctgattatctggcaaaagcgaaactgacaccgtatctcgacgaactggggtttaaccttgtgggatacggttgtaccacctgtattggtaactctgggccgctgcccgatcctatcgaaacggcaatcaaaaaaggcgatttaaccgtcggtgcggtgctgtccggcaaccgtaactttgaaggccgtatccatccgctggttaaaactaactggctggcctcgccgccgctggtggttgcctatgcgctggcgggaaatatgaatatcaacctggcttctgagcctatcggccatgatcgcaaaggcgatccggtttatctgaaagatatctggccatcggcacaagaaattgcccgtgcggtagaacaagtctccacagaaatgttccgcaaagagtacgcagaagtttttgaaggcacagcagagtggaagggaattaacgtcacacgatccgatacctacggttggcaggaggactcaacctatattcgcttatcgcctttctttgatgaaatgcaggcaacaccagcaccagtggaagatattcacggtgcgcggatcctcgcaatgctgggggattcagtcaccactgaccatatctctccggcgggcagtattaagcccgacagcccagcgggtcgatatctacaaggtcggggtgttgagcgaaaagactttaactcctacggttcgcggcgtggtaaccatgaagtgatgatgcgcggcaccttcgccaatattcgcatccgtaatgaaatggtgcctggcgttgaaggggggatgacgcggcatttacctgacagcgacgtagtctctatttatgatgctgcgatgcgctataagcaggagcaaacgccgctggcggtgattgccgggaaagagtatggatcaggctccagtcgtgactgggcggcaaaaggtccgcgtctgcttggtattcgtgtggtgattgccgaatcgtttgaacgaattcaccgttcgaatttaattggcatgggcatcctgccgctggaatttccgcaaggcgtaacgcgtaaaacgttagggctaaccggggaagagaagattgatattggcgatctgcaaaacctacaacccggcgcgacggttccggtgacgcttacgcgcgcggatggtagccaggaagtcgtaccctgccgttgtcgtatcgacaccgcgacggagttgacctactaccagaacgacggcattttgcattatgtcattcgtaatatgttgaagtaacaactatttgcttgccggttattttgcttccggcaagcaaatgaattacacaatgcaagagggttatttgttcagcaaatggcccattttctcggctttggtatcgagataatgttcgttattggggttacgacctacaatcaatggtacgcgttcaacaatattaatccctgcttcggtcagaatttcgacttttttcgggttattggttaacaagcggacttcattgacgccaaggagtttgaacatatcagcgcaaagagtgaagtcgcgctcatcagcggcgaagcctaactggtggttagcctctacggtatcgtaaccttgatcctgcagtgcgtaagcgcggattttattcagcagaccaatgttacgaccttcctgacggtgatacagcaaaataccacggccttcctcggcaatttgcgtcaatgccgcttcgagctggaagccacaatcgcagcgcaagctgaacagggcgtcaccggtcagacattcggaatggacgcgcgcaagtaccggggtatgcccggaaatatcgccatagactagcgcgacatgatcgtgtccggttgccagttcttcaaatcccaccatcaggaaatcgccccatggggttggcagtttggcttctgccacacgtttaagctgcatgaaattctccagataatgctggttctgtattggcttattttgccataacgagaaggggttcacctaatcacgacgcgtcgatcgttcacggaatggcacaaatctgtcaatttttcctggaactggcgttttcagttatgattgtgggacttatcaaaaaggagaggccatgcgttcgattgccagacgtaccgcagtgggagctgcactattgcttgtcatgccagtagccgtatggatttctggctggcgttggcaacctggagaacaaagttggctactaaaagcggctttttgggttactgaaactgtcacccagccctggggcgtcattacacatttgattttattcggctggtttctctggtgtctgcgttttcgcattaaggctgcctttgtattatttgccattctggcggccgcaatccttgtgggacaaggcgttaaatcctggatcaaagacaaagtccaggaaccacgaccttttgttatctggctggaaaaaacacatcatattccggttgatgagttctacactttaaagcgagcagaacgcggaaatctagtgaaagaacagttggctgaagagaaaaatatcccacaatatttgcgttcacactggcagaaagagacggggtttgcctttccttccggtcacacgatgtttgctgccagttgggcactgctggccgttggtttgctgtggccgcgtcggcgaacgttaaccattgctatcttgctggtctgggcaacgggagtcatgggaagccgcctgctgctcgggatgcattggccacgcgatctggtagtagctacgttgatttcgtgggcgctggtggcggtggcaacgtggcttgcgcaacgaatttgtgggccattaacaccacctgcggaagaaaatcgcgaaatagcgcaacgagaacaagaaagttaacgctggttgattttccgaatttagcccttaaatcatcaacaatgcgtgtggatgccatttcgcagacggcgcgaaaatggtactttaaagggctattgcggtaagttgaccataatttattcgctctaaccacataacgggaagtaatgtgaaatatttactcattttcttactggtgttagcgatcttcgtgatttcggtcacgttgggtgcgcagaacgatcaacaggtgacgtttaattatctgttagcgcaaggggagtaccgtatttccacattgctggcggtattgtttgctgcggggtttgctatcggttggttgatttgtggcctgttctggctgcgagttcgtgtttccctggcgcgcgctgaacgtaaaataaagcgactggaaaaccagctttcacccgcgactgacgtggctgtagtgccgcactcgtcagcggcgaaggaataactttctatgctggagttgttgtttctgcttttgcctgtagccgctgcctatggctggtatatgggccgcagaagtgcgcaacaaaacaagcaagatgaagccaaccgcttgtcgcgtgattacgtagcgggggttaacttcctgcttagtaatcaacaggataaagcggtagacctgtttctcgatatgcttaaagaggatacaggcaccgttgaagcccaccttacgctcggaaacctgttccgttcgcgtggcgaagttgatcgcgctattcgcatccatcagaccctaatggaaagcgcctcgctgacctatgaacagcgtctgttggcgattcaacaactggggcgtgattacatggccgccgggttatatgaccgcgcggaagacatgttcaatcagctgaccgatgaaactgacttccgcattggcgcgctgcaacagttgctacaaatctaccaggctaccagtgagtggcagaaagcaattgatgttgccgaacgcctggtgaagctgggtaaagataaacagcgcgtcgaaattgcccatttctactgtgagttagccctgcagcatatggccagcgacgatctcgatcgtgccatgaccttgctaaaaaaaggggcggcggcagataaaaacagcgcccgcgtatccataatgatgggacgcgtgtttatggcgaaaggagaatacgccaaagccgtcgaaagtctgcaacgcgtgatatcccaggacagagaactggtcagcgaaacgctggaaatgttgcaaacctgctatcagcagttgggtaaaactgccgaatgggcagaattcctgcagcgtgcggtggaagagaacaccggtgccgatgctgaattgatgcttgctgatatcatcgaagcgcgcgacggtagtgaggccgcacaggtctatattacgcgccagcttcagcgtcatccgaccatgcgtgtgttccataagttaatggattaccacttaaatgaagcggaagaagggcgtgccaaagagagcctgatggtgctgcgtgacatggttggcgagaaggtacgtagtaagcctcgttatcgttgccagaaatgtggttttaccgcatacaccctctactggcattgtccgtcttgtcgggcctggtcaaccattaaaccgattcgcggtcttgatggcctgtaatttttaaaaaaaatccgactttagttacaacatactaattattaatgttccattgtgctccggcaacgacggcgcagaaaaagcctgccaggggagaaatcgcaactgttaattttttatttccacgggtagaatgctcgccgtttacctgtttcgcgccacttccggtgcccatcatcaagaaggtctggtcatgacgttaactgcttcatcttcttcccgcgctgttacgaattctcctgtggttgttgcccttgattatcataatcgtgatgacgcgctggcctttgtcgacaagatcgacccacgcgattgtcgtctgaaggtcggcaaagagatgtttacattgtttgggccacagtttgtgcgcgaacttcaacagcgtggttttgatatctttcttgacctgaaattccacgatatccccaacactgcagcgcacgctgtcgctgctgcagctgacttaggcgtgtggatggtgaatgttcatgcctctggtggggcgcgtatgatgaccgcagcgcgtgaggcactggttccgtttggcaaagatgcaccgcttttgattgctgtgacagtgttgaccagcatggaagccagcgacctggtcgatcttggcatgacactgtcacctgcagattatgcagaacgtctggcggcactgacgcaaaaatgtggccttgatggtgtggtgtgttctgctcaggaagctgtgcgctttaaacaggtattcggtcaggagttcaaactggttacgccgggcattcgtccgcaggggagtgaagctggtgaccagcgccgcattatgacgccagaacaggcgttgtcggctggtgttgattatatggtgattggtcgcccggtaacgcaatcggtagatccagcgcagacgctgaaagcgatcaacgcctctttacagcggagtgcatgatgagtgattccaacagccgtctggtctactcaacggaaaccggacgtattgatgagcccaaagcggcccctgtacgccctaaaggcgacggtgtggtgcgtattcagcgtcagaccagtggacgtaaaggtaagggcgtttgcctgattaccggtgtcgatctcgatgatgccgaactgacaaaacttgcagcggaactgaagaaaaaatgcggctgcggcggagcagttaaagatggagttattgaaatccagggcgataagcgtgatttattaaaatcactacttgaagcgaaagggatgaaggtaaaactcgcaggcggttaacataaaaagccacggatatatccgtggctttcgaatattttactgtgcgtattattcagttatttcgtactgaacagaatcaagcgtattataattgcgagtcgataatcgacatttatttacgattatttaccgacctggtgaccaataacacctccgacagctgcaccacctaatgtacccaacgtactgccatcggtcagtactgcaccgcctaatgcccctgcacccgcgccgattgcggtgttgcggtcccgtttagaccagttagaacaggcactcagagacattgccaaagtaattgccagaacagccgcggtcatttttttgctcgttacaaacataatactctctcctgaatttatgattcacggaagtaagctctctataactataatagctaagaataagtctggtgaaattattccgtgaaatctgctcgcgcgcagggttatatcacgcaggtgataatgacttcctgttatatcgctgataataattttatatcttgagagtgttaataacaggtaaatagtcttaattatcaaccaggaatcatcttagagcggatgatttgccaaactgcaaatcatccgtagagaagggaaatggttaaatgtcaacgacgtgaatggtgagtttactgtgctcaagatgcatcagatcgctggcgcgtattttcgaatcggtaatcacgcgattgaatcgctcaacgggaccgatggagtatgaatgtacagcaccaaatttcgagctgtcagtcaggactatcgcttcgcactctttttccagcacggcattgaccacatcggtacgcatcatatcgcgaccggtaaatccagtttcaggttgccagccatcaataccaataaatgctttgctgaaatgcacctgttggatgcactggcgtgtcaaagggccaaccatactttcgctttttttctgatacacgccaccgagcaaaataacttcacaaggcgcgtctttcagcaaatgcgcgatgtagctgctgaccgtgatgatagtgacatttttcttctgctcgcccagagtccgggcgagtagggcattgctgctgccattttcgataaagatggtttcgcccggttgaaccagcgacgcggcaaactcggcgagttcacgcttcagcgtatagttgctcatcatacgggtttcgacgtcatcactatcaagcgaaacagcaaagccatgtgcacggcggaggtaactcagtttttcgagtgtgttgagatcctggcgaatggtaacttcagaaactccagtggcttttgccagatcggttacgctaacctgaccctggtcaatgaccatctgtagaatagtttgttgtcgggaattcatcgctgtaattcttataacgttataatacttaataaaaaaatactgacgcgccgggcatcctcaaataggaaaacctgaaggcacgattgttaaatctcccacggtgccttcgggatgtctggcgtagattcagcaacctggcgcaagagttctgctttaagtatctcgagattatggatcgcagagtggtaatcgcctgccacaaggatatctaacacaatatcaatacgttcggcaacgcgctgggcatcaaattcagacatcaaggacatccttatagcaaaagggggaaaatgaataatgcaaaaattgccgctaaaagagaagtgtttaacagcaacggctaattatcatccaggaatacgatatataatgacgggatatagcgctaagtatatatattcatctacttatgcgcgcttcagatagcgtttataccagcgttcgaaggcgacggcgggcatcggtttggcaaacaaaaatccttgccgctcattgatcccgttcttggttaaaaaagcatcttcctttgcactctctacaccttcggcgatcacctgaagattcaatgcctgggccacagcgacgatcgcccggaccagtgactgcgagacaggttgtttgtgaatatctcgaacaaaaacctggtcaagtttgatggcatcgatcggaaagcgcgccagttgcgaaagtgaagagtagccggtaccaaaatcatccagatgcacttgcgcacctagttggctaaattgttgaataacagacagtgccagttcatcattctcaatcagacaactctctgtcagttcaacatctatagggcagtattcaaaattgagttcctggagaacctgtttcagggcggtgaaaatggtttgatcggcgagctgacgtgcagaaatatttaccgccactcgcaggtttatgcctttatcccgccactttgccacctggcgtacgacatcgagaatcacccaacggcctaaaggcacaattagccctgactcttcggcgtaggaaatgaagtccaacggtggaatcaacccacgttcaggtgactgccaacgtactagtgcttccagactgcgcacttcgccacgccaggtgattttcggttgatagtgaataaccaactgatcgttttccagtgctttacgcaagttggtatccagccagagatattcaaatacccgttgattcatttctggggtaaaaacgcaaaattgtcctcgtccgccttccttcgctgtgtacattgctgtgtcggcgtgacgaataatagccgtgctgtctgaaccatgttcgggagagagtgcaatacctactgaacagctggtataaacttcaattaaaccaatgcgaaaggggagccgtaagcgggtcaaaattcgtgatgccattgcttccagcgcgctttgtgaggtgttggatgccagtaccagaaactcatccccacctggacgcgccaacacctggtcatgttcgagacagcttaaaatagccaatgacacgtcgcgtaataactggtcaccaaacaaatgcccataggcgtcgttgacctttttgaaattatccaaatcaagatacacaaccccaactttattgttatctgcatgattaatagcgtgatcgattaaatcctgcattgcgttacgattcggcagtccggtgatactgtcggtatttgccagaatacgcagtcgctcctgagcgcggcgctcttcggtaatgtcggtgccggaacagattaaaaaaatctcgtttttgccactgccgctgtggacaaatttattgcgaaacagaaacagccgctggcctttacatgttggtatccacagttcgacttcatatgcattgccgcttcgaaaaaatacacggttattgcgcctggatgccgcagcttcacgacggctcataaacagtttaaacacgctttgcccaatgacgtcgtgttctttcaaccctgtgtaatcttcacataaccgattgaagcgttggatattcccccggctgtcgagaatcactattgcggaatgtgcttcagaaactacctgctcagcaaaggaaagcccgtgtgataaatcacgagcaaccgccggtgtgtcatgccatgcagacgcgttgccagcccattcccgtttattgatttttcgtcctaccagatgcacagaaagatcgctttcatcgacggtcagactcatcatcaggctggaggtgatgaccgtcatttccctgatgcgagcagcctgttcggcagataactgcaatgtacgatcaggttctgtggtttcggtggtagaaaagcgcaaaacatcgctgctttccgtcaaccgccagtatggattgtgcgatccgagaaagttgtacaacgttgtggactccctaacggttttcatgatgcatatcctccggttaacagcggagtccgcggttaaataaaaggaacaacatgacttacatgaaattaacggcggctaaacgcattgttttttttatatatttatttgtaatccagttttggaaaaacgccagttttcaaacgaaagtcagttaaaaaatctgcctggatataacgaaggtagagcggggaaataaacggcccatccatgaggaatgggccgtgaaaggagattacgcgaccgggcgcgcaataatgctgcgggtttccatgcggacttcggcaatagtgacgtcaataacgtcagtcactttgtaaaccgtttcacctttaatttgtacagtgccgttttcctggctgcaaaccagttcatcgcgcacagcgtgtaagaaaggtgccggaataaaggcgatagcgccgttatcaaccaaacgaacacgcatgccgccacggctgatatcgacaatttccgctgcgaaacgggtgtcggtcccggctttgtctttcaggaagcgtgcgtataaccagtcaccaacatcacgttctgccatccggttgagacggcgacgctcggccatttggacagtgatttcatcctgtgggcgcgtcgcagtttcgcctttgataaccgctttcagcagacggtggttgatcatgtcgccatatttacggatcggcgaagtccaggtggcgtatgcttccagaccgaggccaaagtgaggaccgggttcagtgctaatttcagcaaatgactggaagcgacgaatgcggctgtcgaggaaaccagttggttgcgcgtccagttcacgacgcagtttgcagaaaccgtccagcgtgagcacttcttcggcatcgacatgcagaccgtgcgttttcagcaacgctgccagcgcgtcggcattcgccggatcaaagcccatatgcacgttatagatgccaaaaccgagcttatcgcgcagtacgcgggccgcacaaatgttagcggcaatcatcgcttcttcgacgatacggttggcaatgcgacgaggctcggcgacgatatccagcacttcacctttttcaccgagaataaagcggtaatccgggcgatctttaaacaccagtgcgtggttatgacgccactcgccgcggcgttggcaaatttgcgctagcaaacggacttgttcggcaattgcttcactttcaggctgccagtcaccggtattttccagccagtcagaaacctggtcatacaccagctttgctttggattcgatggtggcggcaaagaattcgatattatcttcaatggtgccatcagcggagagcgtcatgcggcatgccagtaccgggcggacttcattggcgcgcagtgagcagagatcgtcagaaagctcgcgaggcagcatagggatgttgaagccaggcagatagttggtgaatgcgcgaattttcgcggctttgtccagcttgctgccttcagcaatccacgcggttggatcggcaatcgccacaatcagctgaagtttgtcatccggcaacgccttagcgaaaagggcgtcatccatatcttctgtgctggcactgtcgatggtgacaaaatccagcgcggtcagatcttcacgaaccagaccttcatcgagcatttcggtagcgacgccgtctggtgcttctttttccagattatggcgtgcaagggtaacccaccacggtacaaagtgatcgtcaccaaaagtgatgtattgtgtcagttctgcatagaaagaacgatcgcctttcagcggatgacggcgcatttcggcaaccgcccagtcgccttctttaaactcgtggttcaggccacgggctgcgcggcaaggaatggcgtcttttaagagtggatgatcaggaacgatggccagacggtcatttttgccctgaaccttacccacgaaacgagtcaggaacggttcaaccagttcttctggctctgcggattcacgttctttttcactgtggatcaccgcgataattcggtcgccatgcatgacttttttcatctgcggcggcggaatgaaataacttttttgcgcgtcgacttccaggaagccaaagcctttttctgtggcttttaccaccccttcagcgcgtggcgtctgggaatgcagttgctgtttaagctgcgctagcagcgggttgtcctgaaacataattgtctattttggtggccattagagcggctgacagttttacgcgaatctgtctgacgcggcaaggttaatatgtctcacccaacgcgatttttaagcgatttatccagccacacagcccgctccataccagcagattaataatctgcgttgatgatttttcgtgttcgagtaaagggctgaactgggcggcgctaaagcgatcgggtgctcgggtcagccattgtatcgcctgaacggtagcgcgctcaacagaatgacggtcagcccattggttaatttcattttcgcccttgcgcataagggtgctgatttttttatattcatttgatgaatccatacaggtggcaaaacaagcaggactgccatttatacgcgcgcataacaacgccgcaagctgattatccggctgtgtattgccccgtgtgctgtttaacaacttttcgagaagggaaagtgaaatagggtggagagagagtatttcggccagttggcaaagttctgcagttgaactttttgtgtgctcttcaggtagtttttccacctcatagctgcttcgccagcgtaatgattcatcagcaaacagtgacgcgtcggcgtagttttgtatctccagcccgggtaaccagcgtaccggatgcccgagataagcctgaaatgtcgcaattgtccgcgcctgaaagccaataaaaccaatgatttggctaatgatcacacagtcccaggcagtaagaccgacgtcattcagatgctggcgcgatcggttgtcgataatagaaggcgagctagccagttggcgggcatattgcgtgatttgtgccaaccgatgattactttccctggtggaatcaggcccggggagcggcgtaagtcgcgccgaatagtagttacataaccgctggacgccgcaaacctgagcaaccgtcagggccgtcgacaagcgttcataagcggtgaaggtctgtgaacgggtcacggtaagctggtcagggaacaaatccactgcaagaacacgcgcagggtccagccatgaaaggaagggggccagcgtttctttttcaaggatcacgtcgagtagaaagggatcgctgacctttgcggcttccgggaccagaggcagaacgtcatactccgtagtactggattgcgtttcatgataccagtggcttttgccggtgatgtggcgttgttccatgggcgctccttggtcgtaaaggaaatcgttatcctgacgcaaggcgggaaggggagaaagacggatcggcgataacaaatatcagaaaggtataacagagataacgggcggcagaacgccgcccatctttaccaacagaacgattatttcagttcgagttcgttcattgcagcaatgctgaaaccgccgtcaacgtggaccacttcaccggagataccggcagagagatcggagcacaggaatgccgcagagttacccacatcttcaatagtaacggtacggcgaatcggggtaacggcttcgcaatgagccagcattttgcggaagtctttgataccggaggccgccagagtacggatcggaccagcagagatggcgttaacacgcacaccttccggacccatcgcgttcgccatatagcgcacgttcgcttccagagacgcttttgccagacccataacgttgtagttcgggatagcgcgctcagcgccaaggtaggaaagggtcagcagggcagaacccggattcagcatggagcggcaagcttttgccattgcaacgaagctgtaggagctgatgtcgtgggcaattttgaagccttcacgggtaacggcgttaacatagtcaccatccagctgatcgccaggtgcaaaaccaatagagtgtacgaaaccgtcaaatttcggccaaactttccccagttcagcgaacatggtgtcgatgctggcatcttctgcaacatcgcactgcagaacgatgtcagaacccaattgagcggcaaattcttctacgcggcctttcagtttgtcgttctggtaggtgaatgccagttcagctccttcgcggtgcatcgcctgagcgataccgtaggcgatggatagtttgctggcaacaccggttaccagaatgcgcttaccggaaagaaaacccatagctttaatccttattgttgatgcttgttgtgcctgaaaatcaggcgattcgtcgttttagtaaacagtacgaacagataaacggttattataatcaacctggctgtgagtagctatagttgccaggtccgaccggagcaggctgcggcagggggggcgcttttcccctcaccctaaccctctccccagaggggcgaggggaccgtattgtgcaaatattgttaccccagcaacaaacaggctcatacagcccctaaccctttcatggcgatggctgggacggttcagaccttgccgaatattctccagcaccgtctccatgttttcaccacaacagctattcggctcggtctgccccctcgctctttcagggagagggtgaccggcggttcagttcctgcagaatattctccagcaccgtctcctcattacaatcaatctcgttattccagaaacgcagcacggtccagccctgcgactcaagccagctagtgcgcctggaatcataggcaactgctaaatcatgctgcccaccatccagctcaacgactacacgcgccgagcagcaagcaaaatcgagaatgtagctccccactggatgttgacggcgaaatttgaaatcactaaaacgtcggctgcgaagatatcgccagagctttcgttcctgcaaagtgagattgcgtcttaaatcacgcgcatttgatttaattttatctatcacctcattctgacaagatttaatcttttgtcagaatgaggtgaataatctggaaggaggattcagaaaattagcgatctttacgccacgcatccgccgtcaatgcctcgccaaaatgaccggcaatcagccgtttggtgagttcatgcagcggcgatgccagcacatccgcggtgctgcctcgctcgacaacctcgccctgatgcatcaccagcacctggtcgctaatgtgcttcatcattccgatatgctgggtaacataaatatacgaaatgccctgtttttcctgtaattccagcatcagattaatcaactgcgaacgcatcgacatatccagtgaagcgagggcttcatcggcaataatgacttttgggcgcaatatcagcgcgcgcgccagacccagacgctgtttttgtccgggtgccaacatatgcggatagtaactgacgtgatccggtagcagcccaaccatacgcatcgtttcaataatctgtttgcgacgctgttccggttccaggtcggtgttcaggcgcagtggaaaatccagaatttgcgagatacgttgacggggattcaacgaggtcgaaggatcctgaaaaatcatgcgaatacgctgactgcggaaggaataatcgccaaaatgcagtggatgatcgtcaatcaataactcgccgctggtaggctctatcattcccgccagcatttttgccagcgtggatttacccgaaccattctcgccaataatcgccagtgtctggccttcacgtagcgtaaagctcaagggttttaccgcttctacggtctgacgacgaaaccagccggtccggtagcggaacgttttacttaaattacgcacttcaagcagcgtttcgatcatctcactctttctccatgttcagcgggaaatgacaggcatagagatgatttttcgcccccgtcaaacgtggcgtcacaatgcattctcgttgtgcatacgggcaacgtggccccagacgacaaccaatcggtaactgttccagcagtgggatagcgccgggcagcgtattgaggcgacttttatgcggcatcgcgctgccgaagtctggtatcgcgcggatcagcgcctgggtataaggatgatgtggcatcgtcaccaactccttactcggcgcggtttccactgtttgaccgcagtaaagcacgttaattttatccgcccattggctaagcatttgtaagtcatggctgataagcaaaatagtggtattgctgttttggttgagacgcgtcagcaggcgaaagatttgcgcctgggttgttggctccattgagttggtcggttcgtcagcaatcagcagacgcggttgattcgccagtgcaatggctatcatcactttctgacattcaccttcggtcaactcatagggaaaactgcgcatcgcatctttgtgatctttaatccccacgcggtgcagcagttcaatggcacggcgtttgcgccagccaaaacgctgccaccaacggcctttataggtccaggctgggatgttttgcatcaactggcggcccacacgttctgaagggtcaagacacgactgcggttcctggaaaatcatcgacacgttatggccaaccagtttgcgccgttcgcgtgcggagagacgcagcaaatcgatatcatcaaaacgcatacggtcagcagtaacacgccagttatctttattcaccccacaaatcgctttcgcaatcaaactcttgccggaaccggattcaccaacaagaccgcggatttcaccttcggttaaggtcatacttacccggtcgacggctttaacccactcatcaccggttttaaattcaatggtcaggttacgaatatcgagtaatggcattattccacccccgcaataatcgcacgacgaacgccatcgccaaggaggttaaccaacaacacgctaatcataattgccgcacctggcagcatgacagtccacggggcgacataaatcagttccagcgcatcaccgagcatcgctccccattcaggcgaggggagttgtgcgccgagatcgagaaagcccagcgcggcgatatcgagaattgccatcgacagtgcgcgggtgatctcggtgaccagcccggcggtgatgtttggcatcacagcaaaccagagaatattcagcgttgatgcgccatccagacgggcggcgataacgtactctttttccagttcgtcatgcaccatgctgtaaatcgaacgtaccatacgcggcagcaatgccagccagacagcaaacatagcgtgggacaaactcggtccggcaaacgctacaacgataattgccaacagcagcgaagggatcgccagtaaggtatccagaatatggttaagcaccgctgagcggaggccgtgtgtcgccccggcgaaggtgcccagtaccaggccacagatcgtcgcggcaagcgtcaccacaaatgcgccacccacggttggcgcagctccgctcagtaaacggcttaaaacatcgcgtccgaggtcgtcagtccccaggaagaaagaaacttcgccatagcgcgaccatgacggcggcaataattgataaccgagaaattgctggtcgatgccgtaaggcgcaaaccagccgccaaaaatacacagtacagccagccccgcgcagccgtacaggccgaccatcgcagaggcgtcactataaaatttgcgccaggcggtacgcagcgtgcccggcgggcgcttttcgctgtatacgctatcgtaaggcataccattccttatgtttcagagggttagccatggcacccaaaatatcagaaatcacgttaacaataatgaccagtgagccacacaccatcactccggcggaaatggctgcgtaatcctgctggcggatggcgttaattaaccagcgccctaaacccggccagctaaaaaccatttcggtgatcatcgccagcgtcagcatggtggaaaactgtaagcccaggcgaggaataaccggcggtaacgcgttatgcagaacgtggcgacgcaaaatagtaaagcgcgacaaaccgcgggtcgccgccgcttttacatagttctggtcatacacttcgatagtgctgatacgcatcaggcggatcacttcagttgttggcgcaaccgacagggtgatcacgggcaatatcatatggcggattgcgctcatgatcatttcatcccgccatggtgagtccgaaagccaggcatcaatcaacgcaaaaccggtaatcggtttcacttcgtagagcagatcgaaacgccctgaaacgggcaaccaacctagcgtgagtgaacaaaacagcgtcaacagaagcgccagccagaacaccgggattgaaaagcccagtaaggcgatggcgttgatcaagttatcctgccacttatggcgcgtaatcccggcaatcatccccacggggatgccaacaatcagcgcaaaaccgaaggcgaggatgcacagttccatcgtcgccgggaagacctcttttaactgttcggcaatcggttgaccgttaatgctggaaacaccaaaatcccagtggatcaggccgttaaaccagaacacccaggcattccacagtgacgcgccttgtaacggcgcatgaggggtgaaatagctcaagctgaagccaacgaaggtcagcaggaacaaggtgacaatcaataacaaaatgcggcgtaaggtgaagataatcatggttttttcacctcatcctgtttctcgcgatacaccccagcaaaggaggcgttaccaaacgggctaagtaccagacctttgatatcgtaccgataggcctgcaaacgcaatgacgacgccagcggcaaaatgggcaattcctgcgccagaatactctgcgcttcgtcataggcttcaatacgcgccgccagctgctgcgaagagagcgccttacgcaatacgctgtcgaatttcggatcgcaccagtgggcgaggttggtctgcgaatgaattgccgcgcagctcagtaacggacggaagaaactgtccgggtcgttactgtccgtcgcccaaccggataacgtcagatcatggctcatatccatcaaccgcgcctcctgaaagcgaccttctaccggcacaatcaccacttttacgccaacctgcgccatatccgcctgaatcagttcggcagttttcagtggactggggttccacgcctgcgaacgtgtgggcacccacagtttcagcgttaaattttccagccccaacgacttcaactgttcgcgcgatttcgccggattgtattcagtaattttagcctcgttgtcataggcccacgaggcgcgcggtaaaatagaggccgccgtttcagccgtaccataatagatggattgcatcaggcgctggttattaatcgccagtgccagcgcatggcggacagcgggattatttagcggcggtttggcggtgttaaatgccagataggcgacgttcatcccaggacgcagcgttaaacgcaagcgcgggtcgtcacgcaaaatggatagctggctggcagcaggccaggccagaacgtcgcattccccggtcaggagtttcgacagacgtccggtgccgccggagcctaaatccaccactacctgcggcattaacggtttaccgcgccagaagtcatcatgacgttgtaggcgaataaattgcccggcgcggtattccgacaactgatacggaccggtgccgaccggttgacggtcgagttgctcctggcgatcttctttctctaacttccgggcatattctgccgacatgaccgaagcataatgggttgcgaggtgccacaaaaaagaagcatccggctgggcgagtcggaactcaacggtatgattatccagtttgcggacgcttttcacgttatcggcaaattgcaggctgtcgaagtaggggaagttgctgccgttgacgttatgccacgggttgttgcggtcaaaaattcgctggaaggtaaacaccacatcgtcggcattcattttacgagtgggagtaaaccagtcggttttttgaaacggaacatcgcgacgcaggtggaagcgataggtcgcgccgttgtcgagtacttcccagctttcggcaagttccggcatcaggcgataggtatagggatcgacatccagcagtcgatcataaaactgggcggcaagggtatcgacaattaacccactgctcgctttggatgggttaaaggtgttgacttgcccgctgacgcaatagacaaaaccgctgtcgcggatatcagcatgcgggggagattcaggcgcggcgattgcctgaccactcacaagtccagcaatcaccaaaagagacgataatacctggcgcataatattaagggattttatgtaaagaggctatcttactaatatttaatgacatttgccattaccgtttgtgttcaggggtcgtaatgagggccgtgtggttggtcgttgaacaggtgacgtcgccatctgttcaacattcgtacccgtgatttctctataactataactcacagaacaacttagcgaggagcagagcggtacgatcgtgagaaacccattaaagcacgctgcagtgcgtgtcattgttagccagatgcggcgtgaacgctttatccggacaacgatactgaccgatcgtctgcaattaaatcattactcattaccccattgattcaaaaactctgcgatctcatcaatgcgtacgggattaatccccgcttcagcagccatttcatgttgggcttcttcgctgatctcttcattgttcatcaaacgggtgagcagtaactggaagtagtgggccagcggtgtgcgttcagcctctgcgacaggctctgcgcattcggtcgcgtactcatcggcaatatcaaaatattttagcgggatatcgtggttcattatttgcccctggggttaatgcgctaagcataagggcggatgatagcactcgtgatccgggtcatacatctttttatagttaatggcgcggcgcgttaccctcaggcaggataatgcgccgcgcatccgactattacgtttcactcaccggcgttctgtcaccatcatacaacggcactttgcgatagcggcggatcagataccataaatatgcgccgcctaacgaagcccataccagaccgagtgtcagtgacgttgactcgaggttaacccacagcacacccaccgtcagcgcgccaaccagcggcatcagcaaatagtggaagtgatccttccagcttttattcattcctttacgccgccagaaatgattaaacaccgacagattcacgaaggtaaacgccaccagagcaccgaagttaattaacgctgtggcggtaactaaatcgaagaacagcgccgacaacgcgacaatcccgaccataatgacgttgagtgccggagtccgccattttgggtgcacatagccaaacacgcgctccggaaacacattgtcacgccccatcacatacagcagacgcgacacgctggcatgtgaagccaggccagaggctaacgtgttcacaaacgtggtgcagaggaaaatcgactggaagagcttgccgccgacgtacagcgcaatttcaggcagtgcggcatccggatctttaaagcggctgatatcgggaaagaacagctgcataaagaacgacgccgcgataaagataacgccaccgtagaccgccgtcaggaagatggctttcgggatcacgcgtgcggcgtccggcgtctcttccgaaagcgtggtcaccgcatcgaaaccgaggaaggagaaacagacaatcgtcgccccggtaataatcgggatcaggtgcgcgttctcgctgataaacggctgaagtgaccagacggtgccaacgccttctcctttatgcagtccctgaactaccaggaagataaacaccaccatgatggagatttgcaccagtacaaacagggtattgaagttagcgaccaggttgacgctcttcagattcgcggcggttaaaatggcgacgaaggttaccacccacacccacggcggcacttccgggaagagggcggagagatagattttcgccaacaagacgttaatcatcggcaaaaagagataatccagcagcgatgaccagccgaccataaatccgacgtgcgggttaatcgacttttgcgcgtaggtataggccgaaccggcctccggaaactggcgaaccagtttgccgtagctgatagcggtaaacagcacacccgccagcgccagcaaataggacgccggaacgtgaccgtcgctaatgccggagacaataccaaaagtatcaaatacggtcatcggcgtgagataggccagacccatcatcaccacctgccacaatttcagtgattttcgcagacgggttttgccgggttgcgcagcaatattcagtggtgaattaatagccataattgctgcctcccctgcgtaataaggtttgcggtcgtgtcgacctgaaatcaaacctgtttagcaagggaagcaaagggggcggagtccagtcagtagcaggaggggcgcatacgcagcctccctcgccatgcggggatttaatcatcggcatcatctcatttcctcgtcacagtcttaatcgttaacggaagcccgttgccgcccgcgctccataacgcgacatccgggaaatgtctggattaccagcaaatgtcaggcctggctccgctcaggccgatgaaacaaccccgcaaggggtattacgcgtttttcaacatccactcaatttctgtttctgtgatgaggcgctcaaactgcaacagctcatcatttttacaggcgtgatagacatggcagaagcgttcgcctaaatagcggcgcaggtgatcattctcgataaactcacccagggcatcgctctggcgaatcggaaagggtaagccttcctgttccagcccgttgccttcgacttcttcctgcaacggcagctcgttatcaaggccatgcaaaataccggcaaaaatcgctgccatcaccagatatgggttggcatcggcacccgccacgcgatattccacgcggtgattatgacggtcgccgcacggaatacgcagggcgacggtgcggttgttatggccccacgacgcctgcgtcggcacatacattcccggctggaagcggcgatacgagttcacgtttggtgccagcaacgccatcgacgacggcatcaggtcaatcatcccggcgagcatctttttcagcagcggcgaatcttcgccttccgcgtcagaaagcacgttctcgccacgattattttgcatactgatatggatatgcattccgctgcccgcgtgctcttcatacggcttcgccataaaagtggcgtgcatcttatgcttttctgccatcagacgcaccaggcgttttagtgccagcgcatcatcgcaggcttccagcacgttatcagtatggtaaaggttgatttcaaactgacccggcgaggcctcagcgaccgcgccatctgccggaatcagctgtaactgcgccagttcatcaatatcattgagcacgtcggcgaagtggttgaggttatcaacggagtaaacctggctttgtgtattgcggtcatcggtgccaggcgcgcagggcggttgcagatacccttcagcgtcgcgctggcgatccagtaaatagaactccagctctaccgctacgaccgggaacaatccgcgctggcgcagctgctgccacaggcggttaagaacgttccgcggctcaacgtcaaagggagcgccatcttcatcgaccatggtcaggagcatctgaccgataaactctggatcggcggcagaaggagttaaggaaccgagaacaggaacacaggtacgatccggctcgcccatttcctgacccagacctgcttcttctactacgttgcccagaatatccattgcaaataccgaggccgggaaataacaccctttctcgagcttcttcaggcttgaaacaggaatacgctttccacggaagcaaccatttaaatcggtaagtaaaacatcaacatattgcgtattcgggtagcgctccaggtagcgtttcacttcctgcgtaaaggcgctaccccgcctctcttctgactgctgaacaaagttctctacttcaacgatattggtttccatgattcttcgcctttggtttgttttccgctcgttatcaaagcgtaaaatataatgaccaccattcgaatctgtatgcaaactaaatgtttgtcaaatgttaaattgagtttgcaaaaatgaaaacccactgctagattgaaaaaatattgaacataaaggtcatttaaagcgcagtaatggcgataatttagtccactttgtgagattgagcatggaaaatataatgaacaatccggttatcggtgtcgtaatgtgcaggaacaggcttaagggtcatgcgacccagactctgcaagaaaagtacctgaatgccatcatccatgcaggcggcttgcctattgcgctaccacatgcgctggcggaaccgtcattacttgaacaacttttgccgaaactcgatggcatttatcttcctggtagtcccagcaatgtgcagccgcacctatatggtgaaaacggcgatgagcctgacgccgatcccgggcgtgatcttctgagcatggcgataattaatgccgcactcgaaaggcgcatccccattttcgccatctgccggggtttacaagaactggtggtggcaaccggtggttcgttgcatcgcaagctgtgcgaacagcctgaattgctggaacatcgggaagatcccgaactgccggtggaacagcaatatgcaccgtcgcatgaagttcaggttgaagaggggggattactgtctgcgttgttacctgaatgtagcaacttttgggtaaactctctacatggacaaggggcgaaggtcgttagcccacggttgcgtgttgaagctcgctcgccggatggcttagttgaggcggttagcgtcatcaatcatccttttgcgctgggcgtacagtggcacccggaatggaacagtagcgagtacgcgctttcgcgtatattgttcgagggctttatcaccgcttgtcagcaccatatcgctgaaaaacagcgactctgaccactacagtttaaggaaatgcaaatatgagtgatgagggactggcgccaggaaaacgcttgtcggaaatccgccagcagcaggggctttcacaacgtcgtgccgccgaactctccgggctgactcacagtgctatcagtacgatagaacaagataaagtcagccctgccatcagtacgctgcaaaagctgctgaaggtgtatggtctgtcactctcggaattcttttccgagccggaaaaacctgatgagccgcaggtcgtcattaatcaggacgacttaattgagatgggtagtcagggtgtgtcaatgaagctggttcataacggtaacccgaatcgcacgctggcgatgatctttgaaacgtaccagccgggcacaaccactggggaaagaattaagcatcagggtgaggaaataggcactgtactggaaggtgaaattgttctgacgattaatggtcaggattaccacctcgtcgcggggcaaagttatgccattaataccggcatcccgcacagtttcagtaatacgtcggcaggtatttgccgaattatcagcgcccatacgcccaccacgttttaatctttttgttctgtaagccgggtaagcgcaatgcgcccggcaatctatacacaaaatcattcaagttgcatcaaggcggcaagtgagcgaatcccgatgagcttactcaggtaagtgattcgggggagcgaacgcagccaaggcagaggcggcttgaaggatgaagtgtatataaagaatgtcgccagaaataaacgggcatacggcccggggatctctgcgccctgacgttcacaaactgcatatatctgatagacgtgaaacaggagtcataatgaattttcatcatctggcttactggcaggataaagcgttaagtctcgccattgaaaaccgcttatttattaacggtgaatatactgctgcggcggaaaatgaaacctttgaaaccgttgatccggtcacccaggcaccgctggcgaaaattgcccgcggcaagagcgtcgatatcgaccgtgcgatgagcgcagcacgcggcgtatttgaacgcggcgactggtcactctcttctccggctaaacgtaaagcggtactgaataaactcgccgatttaatggaagcccacgccgaagagctggcactgctggaaactctcgacaccggcaaaccgattcgtcacagtctgcgtgatgatattcccggcgcggcgcgcgccattcgctggtacgccgaagcgatcgacaaagtgtatggcgaagtggcgaccaccagtagccatgagctggcgatgatcgtgcgtgaaccggtcggcgtgattgccgccatcgtgccgtggaacttcccgctgttgctgacttgctggaaactcggcccggcgctggcggcgggaaacagcgtgattctaaaaccgtctgaaaaatcaccgctcagtgcgattcgtctcgcggggctggcgaaagaagcaggcttgccggatggtgtgttgaacgtggtgacgggttttggtcatgaagccgggcaggcgctgtcgcgtcataacgatatcgacgccattgcctttaccggttcaacccgtaccgggaaacagctgctgaaagatgcgggcgacagcaacatgaaacgcgtctggctggaagcgggcggcaaaagcgccaacatcgttttcgctgactgcccggatttgcaacaggcggcaagcgccaccgcagcaggcattttctacaaccagggacaggtgtgcatcgccggaacgcgcctgttgctggaagagagcatcgccgatgaattcttagccctgttaaaacagcaggcgcaaaactggcagccgggccatccacttgatcccgcaaccaccatgggcaccttaatcgactgcgcccacgccgactcggtccatagctttattcgggaaggcgaaagcaaagggcaactgttgttggatggccgtaacgccgggctggctgccgccatcggcccgaccatctttgtggatgtggacccgaatgcgtccttaagtcgcgaagagattttcggtccggtgctggtggtcacgcgtttcacatcagaagaacaggcgctacagcttgccaacgacagccagtacggccttggcgcggcggtatggacgcgcgacctctcccgcgcgcaccgcatgagccgacgcctgaaagccggttccgtcttcgtcaataactacaacgacggcgatatgaccgtgccgtttggcggctataagcagagcggcaacggtcgcgacaaatccctgcatgcccttgaaaaattcactgaactgaaaaccatctggataagcctggaggcctgaaatgaccgaacataccagcagttactacgccgccagtgcgaataaatatgcaccattcgacacgctgaatgagtcaatcacctgcgacgtttgcgtggttggcggcggctataccgggctctcctccgcgctgcatctggcggaagcgggctttgacgtagtggttctcgaagcctcacgcatcggctttggcgcaagcgggcgcaatggcggacagcttgtgaactcctacagccgcgacatcgacgtgatcgaaaaaagctacggcatggacaccgcccgtatgctcggcagcatgatgttcgaaggtggtgagatcatccgcgaacgtatcaaacgttatcagattgactgcgactaccgccccggcggcctgtttgtggcgatgaatgataaacagctcgccacacttgaagagcagaaagagaactgggaacgctacggcaataaacagctggaattgctggacgccaacgccattcgccgtgaagtagccagcgatcgctataccggtgcgctgctggatcacagcggtgggcatattcatccgctaaaccttgccattggcgaagcggacgccatccgcctcaacggcgggcgcgtgtatgaactttctgccgtgacgcagatccagcacaccacgccagccgttgtgcgaactgccaaaggtcaggtgacggcgaagtatgtgattgtcgccgggaatgcgtatctgggcgataaagtagagccggaactggcgaaacgcagcatgccgtgcggcacgcaggtgatcaccaccgaacggctgtcggaagatttagcccgttcgctgatcccgaaaaactactgtgtggaagactgtaactatctgcttgattactaccgtcttaccgccgacaaccgcctgctgtacggcggcggcgtggtctacggcgcgcgcgacccggatgacgttgagcgccttgtggtgccgaaactgctgaaaaccttcccgcagctgaagggcgtgaaaattgattaccgctggacgggcaacttcctgctgaccctgtcgcgtatgccgcagtttggtcgcctcgataccaacatctattacatgcagggctacagcggccacggcgtgacctgtactcatctagccggacgtttgattgccgaactgctgcgcggcgacgccgaacgtttcgatgccttcgccaatctgccgcattacccgttccccggcgggcgcacgctgcgtgtgccgtttaccgcgatgggcgcggcgtattacagcctgcgcgatcgtctgggcgtttaatttccgattaaccgtgaagagtcaaaaggtgtgaaacatgagcaacaatgaattccatcagcgtcgtctttctgccactccgcgcggggttggcgtgatgtgtaacttcttcgcccagtcggctgaaaacgccacgctgaaggatgttgagggcaacgagtacatcgatttcgccgcaggcattgcggtgctgaataccggacatcgccaccctgatctggtcgcggcggtggagcagcaactgcaacagtttacccacaccgcgtatcagattgtgccgtatgaaagctacgtcaccctggcggagaaaatcaacgcccttgccccggtgagcgggcaggccaaaaccgcgttcttcaccaccggtgcggaagcggtggaaaacgcggtgaaaattgctcgcgcccataccggacgccctggcgtgattgcgtttagcggcggctttcacggtcgtacgtatatgaccatggcgctgaccggaaaagttgcgccgtacaaaatcggcttcggcccgttccctggttcggtgtatcacgtaccttatccgtcagatttacacggcatttcaacacaggactccctcgacgccatcgaacgcttgtttaaatcagacatcgaagcgaagcaggtggcggcgattattttcgaaccggtgcagggcgagggcggtttcaacgttgcgccaaaagagctggttgccgctattcgccgcctgtgcgacgagcacggtattgtgatgattgctgatgaagtgcaaagcggctttgcgcgtaccggtaagctgtttgccatggatcattacgccgataagccggatttaatgacgatggcgaaaagcctcgcgggcgggatgccgctttcgggcgtggtcggtaacgcgaatattatggacgcacccgcgccgggcgggcttggcggcacctacgccggtaacccgctggcggtggctgccgcgcacgcggtgctcaacattatcgacaaagaatcactctgcgaacgcgcgaatcaactgggccagcgtctcaaaaacacgttgattgatgccaaagaaagcgttccggccattgctgcggtacgcggcctggggtcgatgattgcggtagagtttaacgatccgcaaacgggcgagccgtcagcggcgattgcacagaaaatccagcaacgcgcgctggcgcaggggctgctcctgctgacctgtggcgcatacggcaacgtgattcgcttcctgtatccgctgaccatcccggatgcgcaattcgatgcggcaatgaaaattttgcaggatgcgctgagcgattaatagcccaacgcaataatgtctgatgcgctgcgcttatcaggcctgcaaacgacgtattgattatgtatgccgaataaagcattcacgccgcatccggcaagttgtattgctcaacttcgctaaatctggtgctttttcaacaacgcgcggaactgatgataagttaaccccagtaattcagccgcgcgcttctggttatatttcccttgttgcaaactgagttgcagcaactctttttcctgctgcatctgaaactcacgtaaatccagcggcagtgttggaagcgaggtggtttctgaaacggcgatagcgtcttcaggcggacgccgtttaaagggatcaataatgatgtcatcaagcggataatcgctggtgccgtggcgatacactgaacgttccaccacgtttttcaattcacgaatatttcccggccaacgataattcagcaatgtttctctggcgcgctccgtaaaccccgggaacagaggcagcttgatttcccgacacatctggatggcaaagtattctgccatcaacattatgtcgctttcgcgctcgcgcagtggtggcagttgtacaacatcaaaagccagtcggtcgagcaggtcagcgcgaaaagtgccttcattgaccatcgccgggagatcggcattcgtcgcgcataccaaccgcacattcacctgcaatggttggctgccgccaacgcgctccagttcaccgtactcaatcacgcgcaataatttctcctgcaccatcatcggtgccgtagcgagttcatcaagaaatagcgtaccgccgtcggcacgttcaaatctccctggatgacgtttttgcgcaccggtaaacgcccccgcttcgtgaccaaacagttcggaatccagcagattttcatttaacgccgcgcagttaagggaaataaacggcccttgccaacgggaggagagataatgcaggcggctggcaatcagctctttaccggtgccgcgttcgccgatgatgagcaccggtttgtccagcggtgcgagatgcgaaacctgttccagcacttcgagaaagctgttcgcctcaccaagtaaattatctttgtattctgccatgatgaaattcgccacttgttagtgtaattcgctaactcatcctggcatgttgctgttgattcttcaatcagatctttataaatcaaaaagataaaaaattggcacgcaaattgtattaacagttcagcaggacaatcctgaacgcagaaatcaagaggacaacattatgggtattttttctcgctttgccgacatcgtgaatgccaacatcaacgctctgttagagaaagcggaagatccacagaaactggttcgtctgatgatccaggagatggaagatacactggttgaagtacgttctacttcggcgcgcgcgttggcagaaaagaaacagctgactcgccgtattgaacaagcgtcggcgcgtgaggttgaatggcaggaaaaagccgaactggcgctgctgaaagagagagaggatctggcacgtgcagcgttaattgaaaaacagaaactgaccgatctgattaagtccctggaacatgaagtgacgctggtggacgatacgctggcacgcatgaagaaagagattggcgagctggaaaacaaattgagcgaaacacgcgctcgccagcaggcattgatgttacgtcatcaggcggcaaactcgtcgcgcgatgtgcgtcgtcagctggacagtggcaaactggatgaagcaatggctcgtttcgaatctttcgaacgtcgtattgaccagatggaagcggaagcagaaagccacagcttcggtaaacaaaaatcgctggacgatcagtttgccgaactgaaagccgatgatgcaatcagcgaacaactggcacaattaaaagccaaaatgaagcaagacaatcaataataacatccaggcggcgtccgaacgcgccgccgctcatcgtctaaggagtacttatgagcgcgctatttctggctattccgttaaccatttttgtgctgtttgttttaccgatctggttatggctgcattacagcaatcgttctggtcgcagtgaattgtcgcaaagtgagcagcagcgattagcgcaactggctgatgaagcaaaacggatgcgcgaacgtattcaggcgctggaatctattcttgatgcagaacatccgaactggagggatcgctaatggcgggcattaatctcaataaaaaattatggcgtattccacagcagggcatggtccgcggcgtctgcgccgggattgccaactattttgatgtaccggtaaaactggtgcgtatcctggtggtgctgtcgattttcttcggtctggcgctgtttaccctggttgcttacatcattttgtcatttgcgcttgatccaatgccggacaacatggcctttggtgagcagctaccttccagcagcgaattgctggatgaagtcgaccgtgaactggcggcaagtgaaacgcgtttacgcgagatggaacgttatgtcacttccgatactttcacgttacgtagccgtttccgtcaactgtgaggaaagttatgaatactcgctggcaacaggccgggcaaaaggtaaagcctggtttcaaattagcaggcaagctggtacttcttaccgcactgcgctatggcccggcgggtgtggcgggctgggcgataaaatcagttgctcgccgaccgctgaaaatgttgctggctgtggcgctggaaccgctgttaagtcgggctgctaataaactggcacagcgttataaaaggtgaggggagtttcgcaaaaattgttaaatctcaggcgtataatggatggcaattttcatccatagaaggacgcttacatgtttaaaaaaggcttacttgctctggcactggtgttttcactgcccgttttcgccgctgaacactggatcgatgttcgtgttccagagcagtatcagcaagagcacgttcagggggccatcaatattcccctgaaggaagtgaaagagcgcattgccaccgccgttccggataaaaacgacaccgtgaaagtgtattgcaatgccggacgccagtcagggcaagcaaaagagatccttagcgagatgggatatacccacgttgagaacgccggtggcctgaaagacatcgcaatgccgaaggtcaaaggttaaaagaattcaccatgagcggcgcttatgcgccgtttttttttctgtcacaccttatttacatccccatagattatttgcgtcagctcacaaatacgctttttccctggtaaaaaatgatttcctgcgtgactaaaacccttgtgctcaattgacagtttattttctgcggagtagtctctcgtttcatgggaccgctaccacggaaaggcaacatgaaacagaaaattacggattacctggacgaaatctacggtggaacatttaccgcaactcatttacagaaacttgtaacgcgtcttgagagtgcgaaacgattaattacacagcgacgtaaaaaacactgggatgaaagtgatgtcgtgttaattacctatgccgatcaatttcacagcaatgatttaaaaccattacccacatttaatcagttttaccatcaatggctgcaaagcattttttcacatgttcatttgttgccgttttatccatggtcatctgatgatggcttttcggtaattgattatcatcaggtcgccagtgaagcgggggagtggcaggatattcagcaactcggtgaatgcagtcatttaatgtttgattttgtctgcaaccatatgtcggcaaaaagtgaatggtttaaaaactatttacaacagcatccaggttttgaagatttttttattgccgttgacccgcaaaccgatctcagcgccgtcactcgcccgcgtgcgttaccgttattaacgccattccagatgcgcgatcattcaacgcgccatttatggaccacctttagtgacgatcaaattgacctgaattaccgtagccctgaagtgttgctggcgatggtggatgttttactctgttaccttgcgaaaggtgctgagtatgtccgcctggatgccgttggctttatgtggaaagagccgggaacaagctgcatccatctggaaaaaacacatctgattatcaaactgttacggtcgattattgataacgttgcgccaggtacagtgatcattaccgagaccaatgttccgcataaagacaacattgcttactttggcgcaggcgatgacgaagcacatatggtgtaccagttctcgctgccgccactggtgctgcatgcggtgcaaaaacagaacgttgaggcgctttgtgcgtgggcgcaaaacctgacactaccttccagcaacaccacctggtttaacttcctcgcctctcacgatggcatcgggctaaacccgctacggggcttgttgcctgaaagcgaaatattagagctggtcgaggcgttacagcaggaaggtgcattagtaaactggaaaaataatcccgacggtacacgcagtccgtatgaaataaatgtgacctatatggatgcgttaagccgccgtgagagtagcgatgaagaacgttgcgccaggtttatccttgcccatgcgattttgttaagtttccccggtgtgccagcgatatatattcaaagtattcttggctcgcgtaatgattacgcaggtgtcgaaaaactcggatataaccgtgcgattaaccgtaaaaaatatcacagtaaagagataacccgagaactgaacgatgaagctacattaaggcatgcggtatatcatgagttgtcgcgtttaattacacttcgtcgcagccataacgagtttcatccggataataattttaccattgatacgattaattcatccgtaatgcgtattccaagaagtaacgctgatggtaattgtctgactggattgtttaatgtcagtaaaaatattcagcatgtaaatattactaatctgcatggtcgggatctgattagtgaagttgatatattgggtaatgaaataacgctgcgcccctggcaggttatgtggattaaataaaaaggaacatctcatgattaaatcaaaaatcgtgctgttatcagcactggtttcatgcgccctgatttcaggctgtaaagaagaaaataaaacgaatgtatccatcgaatttatgcattcttcggtggagcaggagcgccaggccgttatcagtaaattgattgcccgttttgaaaaagaaaaccctggcatcaccgttaagcaagtgcccgtggaagaagatgcctataacactaaagtcattactctttcacgtagcggttcgctgccggaagtgatcgaaaccagccatgactacgccaaagtgatggacaaagagcagcttatcgatcgcaaagcggttgccacagtcatcagcaacgttggtgaaggcgcgttttacgatggcgtactgcgtattgtgcgtaccgaagatggtagcgcatggaccggtgttcctgtcagcgcctggattggcggtatctggtatcgcaaagatgtgctggcaaaagcggggcttgaggagccgaaaaactggcaacagctgctggacgttgcacagaaactgaatgacccggcgaataaaaaatacggcattgcgctgcctacagcagaaagcgtgttgacggaacaatccttctcccagtttgcgttatccaaccaggctaacgtctttaacgccgaaggcaaaatcacccttgatacaccagagatgatgcaggcactgacctattaccgcgaccttactgccaacactatgccgggttctaacgacatcatggaagtgaaagacgcctttatgaacggcaccgcgccgatggcgatttactccacctatatccttccggctgtgattaaagaaggcgacccgaaaaacgtcggtttcgtggtgccaaccgagaaaaactctgcggtctacggcatgttgacctcgctgaccattaccgccgggcaaaagaccgaagagacggaagcagcagaaaaatttgtcacctttatggagcaggcagacaacattgccgactgggtgatgatgtcgccaggtgctgcgctgccggtgaataaagcggtggtgactaccgccacctggaaagacaacgacgttattaaggcgctgggtgaactaccgaatcagctaatcggtgaactgccaaatattcaggtttttggcgcagtaggggataaaaactttacccgcatgggtgatgtgacgggttctggcgtggtgagttcaatggtgcataacgtcaccgtgggtaaagccgatctctctactacgctgcaagcgagccagaaaaaactggatgaactgatcgaacagcactaaacccaggacaggaatccgcaatgaacaggcttttttcaggtcgttccgatatgccctttgcgctgctgcttctcgcgcccagcttattactgctgggcggtctggtggcgtggccgatggtgtcgaatatcgaaatcagttttttacgtctgccgctcaatcccaacatcgagtcaacgtttgttggggtgagcaactatgtgcgtatcctctccgatcccggcttctggcattcgctgtggatgacggtctggtataccgcgctggtggtggcgggcagcaccgtgctcgggctggcggtggcgatgtttttcaaccgcgagttccgcctgcgcaaaaccgcgcgttcgctggtgatcctctcctacgtaacgccgtccatttcgctggtgttcgcctggaaatacatgttcaacaacggctacggcattgttaactacctcggcgtcgatcttctgcatctctatgagcaggcaccgctgtggttcgataatccgggcagtagctttgtgctggtggtgctgttcgccatctggcgctacttcccgtatgcctttatctcgtttctggcgattttgcagaccatcgacaaatcgctgtacgaagcggcagagatggatggcgctaatgcctggcaacggtttcgtatcgtcacgctgcccgcaattatgccggtcctggcgacggtggtgacactgcgcaccatctggatgttctacatgttcgcggatgtttatttgctgacgaccaaggtcgatattctcggtgtatatctctacaaaaccgcctttgcctttaatgatttaggaaaagcggcggcgatctcggtggtgctcttcatcattattttcgctgtcattctgctgaccaggaaacgggtgaacctcaatggcaacaaataaacgcacactcagtcgcatcggtttttactgcgggctggcgctgtttctcatcatcacgctgtttccattttttgtgatgctgatgacctcgttcaagggcgcgaaagaggcgatctcactgcatcctacgctgctgccgcagcagtggacgctggagcattacgtcgacatttttaacccgatgattttcccgtttgtcgactacttccgtaacagtctggtggtgtctgtggtttcatccgtggtggcggtattcctcggcattcttggggcttacgcgctttcccgcctgcgctttaaaggtcggatgaccatcaacgccagcttttacacggtgtatatgttctctggcattttgctggtggtgccgcttttcaaaatcatcaccgcgcttggcatttacgacactgagatggcgctgatcatcaccatggtgacgcaaactctgcccaccgccgtgtttatgctgaaaagctacttcgacaccatccccgatgagatcgaagaagcggcgatgatggatggcctcaaccgtctgcaaattatcttccgcatcaccgtgccgttggcgatgtccgggctgatatccgtgttcgtctactgctttatggtggcgtggaacgactatctgtttgcgtcgattttcctctccagcgccagcaatttcaccttaccggtgggcctgaacgcgctgttcagtacgccagattacatctggggacggatgatggcggcctcactggtgaccgcattgccggtggtgattatgtatgcgctttcggaacgttttattaagagtggtttgaccgccggtggcgtgaagggctaaagcggccagtttctttacaaggagttttaaatgaaaaagttagtagccacagcaccgcgtgttgctgcgctggttgagtatgaagatcgggcgattttagctaatgaagtgaagatccgcgtgcgtttcggcgcaccgaaacacggaacggaagtggtcgacttccgcgccgccagcccgtttattgatgaagactttaacggcgaatggcagatgttcactccgcgtccggcagatgcgccgcgcggcattgagtttggcaaattccagcttggcaacatggtggttggcgacattatcgagtgcggcagcgacgttaccgactacgcggtgggcgacagcgtatgcggctacggcccgctctccgagacggtcatcattaacgcagtgaataactacaagctgcgcaaaatgccgcaaggcagctcctggaaaaacgccgtctgctacgacccggcgcagtttgccatgagcggcgtgcgcgatgccaacgtgcgcgtaggggattttgtggtggtggtagggcttggcgcaatcggtcaaattgccatccaactggctaaacgcgctggcgcttctgtggtgattggcgtcgatcctatcgcccatcgctgtgatattgcccgtcgccacggcgcggatttctgccttaaccccatcggcactgatgtaggtaaagagatcaaaacgctgaccggcaagcagggtgccgatgtgattatcgaaaccagcggctacgccgacgcgctgcaatcggcgctccgcggtctggcttatggcggcaccatctcctatgtcgcgtttgccaagccgtttgccgaaggttttaacctcggacgcgaagcgcatttcaataacgccaaaattgtcttctctcgcgcgtgcagcgaaccgaacccggattatccgcgctggagccgcaagcgtattgaagaaacctgttgggaactgctgatgaacggttatctcaattgcgaagatttaatcgacccggtggtgacctttgccaatagcccggaaagctatatgcagtatgtcgaccagcatccggaacagagcatcaaaatgggcgttacgttttaattcaaaggaatgaaaaaaatgaaaatcggcacacagaatcaggcgttctttccggaaaacattctggagaaatttcgttatatcaaagagatgggcttcgatggttttgagattgacggcaaactgctggttaacaacatcgaagaagtcaaagcggcgatcaaagaaaccggtttaccggtgaccaccgcctgcggtggctatgacggatggattggcgactttatcgaagagcgtcgtcttaatggcttaaagcagatcgagcgcattctcgaagcgctggcagaagtgggcggtaaaggcatcgtcgttccggctgcgtggggcatgtttaccttccgcttaccgccgatgacctcgccgcgtagcctggacggcgaccgcaaaatggtgagtgattccctgcgcgtactggaacaggtcgccgcgcgtaccggaaccgtggtgtatctcgaaccgttaaaccgctatcaggatcatatgatcaacaccctcgccgatgcccgccgttacatcgtcgaaaacgatcttaaacatgtacagattatcggcgatttctatcacatgaatatcgaagaagataacctggcgcaggcgctgcatgacaaccgcgacctgctcggtcatgtgcatattgcggataaccatcgctaccagccgggcagcggcaccctggatttccacgcgctgtttgaacagctgcgcgcggataactatcagggctatgtagtgtacgaagggcgtatccgggcggaagatcctgcccaggcgtaccgtgattcgttggcctggttgcgtacctgctaagaggtctttgtgaaaagtgcaatgacaagctctccgctgcgggtcgcgataataggcgcaggccaggtggcggataaggttcatgcttcgtactactgcacccgcaacgatctggaactggtggctgtctgtgacagccgcctttcccaggcgcaggcgctggcagaaaaatacgggaatgcatccgtgtgggacgatccgcaggccatgctgctggcggtgaaacctgatgtggttagcgtctgctcacctaaccgttttcattacgaacataccctgatggcactggaagcgggctgccatgtgatgtgcgaaaaaccgcccgccatgacgccagaacaggcgcgggaaatgtgcgataccgcgcgcaaactgggcaaggtgctggcctacgactttcaccatcgttttgcgctcgatacgcaacagctgcgtgaacaggtgaccaacggcgttttgggagagatttacgttaccaccgcccgcgccctgcgtcgctgcggcgttcccggctggggtgtctttaccaataaagaactgcagggtggtggcccgctgatcgacatcggcattcatatgctggatgctgcgatgtatgtgctgggctttccggcggtgaaaagcgtgaatgcgcatagctttcaaaagatcggcacgcaaaagagctgtggtcaatttggtgagtgggatccggcaacttacagcgtcgaagattcgctgtttggcaccattgaatttcataacggcggcattctgtggctggaaacgtcatttgcactcaacatccgcgaacagtcgattatgaacgtcagcttttgtggtgataaagctggtgcgacgctgtttccagcacatatctacaccgataacaacggtgaattaatgacgctgatgcaacgggaaatagcagacgacaaccgccatttgcgcagcatggaagcctttatcaatcacgtacagggcaagcccgtgatgatagccgacgccgagcaggggtacatcatccagcaactggtggcggcgttgtatcaatccgcagaaacagggacgcgtgtggaattatgaccaggccagtaacgttatcagaaccccatttcagccagcataccctgaacaagtatgcatcgctgatggcgcaggggaacggctatcttgggcttcgcgccagccatgaagaagattacacgcgccagacgcgagggatgtatctggcggggctgtatcatcgggcgggaaaaggtgaaatcaacgaactggtgaacctgcctgatgtcgtggggatggagattgccataaatggtgaggttttctcgttatcccacgaagcctggcagcgtgagcttgactttgccagtggcgaattacgccgcaatgttgtctggcgtaccagcaacggctcaggttacaccatcgccagccgtcgctttgtttcggcagaccaactgccgctcattgcgctggaaatcactattacgccactggacgccgacgcgtcagtgctgatttcaacaggcattgacgccacgcaaaccaatcacggtcgccaacatctcgacgaaacccaggtgcgggtgtttggtcagcatctgatgcaggggagctacaccacccaggatggacgcagtgatgtggccatcagctgttgctgtaaggtgagcggtgatgtgcagcaatgctataccgccaaagagcgccgtttactgcaacataccagtgcgcagcttcatgcaggcgagacaatgacgttgcaaaaactggtgtggatcgactggcgggatgacaggcaagctgctttagacgagtggggcagcgcgtcgcttcgccagcttgaaatgtgcgcgcagcagagttacgaccaacttcttgcagcatcaacagaaaactggcgtcaatggtggcagaaacgtcgtatcacggtaaatggcggcgaagcgcacgatcagcaagcgttagattatgcgctttatcatctgcgcatcatgacgcctgcccacgacgagcgcagcagcattgcggcaaaaggcttaaccggcgaaggctacaaaggccacgttttctgggatacagaagtatttttgttaccgtttcatctgtttagcgatccgacggttgcccgaagtttactgcgttatcgctggcacaacttgccaggcgcgcaggagaaagcgcgacgcaacggctggcagggcgcgctatttccgtgggaaagcgcgcgcagcggcgaagaagagacgccggaatttgccgccattaacattcgcaccgggctgcggcaaaaagtggcctcggcgcaggcggaacatcatctggtggccgatatcgcctgggcggttattcaatactggcagaccacgggggatgaaagtttcattgcgcatgaaggcatggcgctacttctggagacggcaaagttctggattagccgcgcggtgagagttaacgatcgtctggaaattcatgatgttattgggccagacgaatataccgaacatgtcaataataatgcatacaccagctatatggcccgctacaacgttcaacaggcgctgaatattgcccgccagttcggctgtagcgacgatgcgtttatccatcgcgccgaaatgttcctcaaagagctatggatgccagaaattcagcccgacggcgttttgccgcaggatgattcgtttatggctaagccggcgattaatctggcgaaatacaaagcggcggcggggaagcaaaccatactgctggattattcacgcgcagaagtgaacgagatgcagatcctcaaacaagctgatgtggtgatgctcaattacatgctgccggagcagttctcagcggcatcgtgtcttgccaatctgcaattttatgaaccgcgcactattcacgactcgtcattaagtaaagcaatccacggcattgttgccgcacgctgtggcctgctgacccaaagttatcagttctggcgcgaggggactgaaatcgatcttggtgctgatccgcatagttgtgatgatggtatccatgctgccgcaactggcgctatctggctgggggcgattcagggttttgccggggtgagcgtgcgtgacggtgaattgcatctcaatccggcgttacctgagcagtggcaacagttgtctttccctctgttctggcagggctgcgaattacaggtcactcttgacgcgcagcgtattgcgattcgaacttctgcgcccgtttcactgcgtttgaacggtcagcttataaccgtggctgaagaatctgttttctgtttgggtgattttattttgcccttcaatgggaccgctaccaaacatcaggaggatgaatgaaactgcaaggggtaattttcgatctggatggtgtaatcaccgataccgcgcatctgcatttccaggcgtggcagcagattgccgctgaaattggcatcagcattgatgcgcagtttaacgaatccctaaaagggatcagccgcgatgagtctctgcggcgcattctgcaacacgggggcaaagagggcgactttaactcgcaggagagggcgcaactggcgtatcgcaaaaatctgctctatgtccactcactacgcgagttgacggtcaacgctgttctacccggcattcgctctttgctggcagatctccgtgcacagcagatctcggttgggctggcttctgtctccctgaatgcgccgacgattttagcggcgctggagctgcgcgagtttttcaccttctgcgcggatgcttcccaacttaaaaactcgaaaccggacccggaaatctttctcgccgcctgtgcagggctgggcgtgccgccgcaggcatgtatcggcattgaagatgcgcaggcgggcattgacgccattaacgccagcggtatgcgctcggtggggatcggcgcgggcttaaccggggcgcaattactgttgccttcaacggaatcactcacctggccgcggttatcggccttctggcaaaacgtatagcaaaggaatcaacatggctcagctttcgttacaacatattcaaaaaatctacgataaccaggtgcatgtggtgaaggacttcaacctggaaattgccgataaagagttcatcgtgtttgtcggcccgtcgggctgcggtaagtcgaccaccctgcgcatgattgccgggcttgaggagatcagcggcggcgatctgttgatcgacggcaaacgaatgaatgacgttccagccaaagcacgcaatatagcgatggtgttccagaactacgcgttgtatccgcatatgacggtttacgacaacatggcgtttggtctgaagatgcaaaaaatcgccaaagaggtgattgatgagcgggtgaactgggcggcgcaaattctcggcctgcgtgagtacctgaaacgtaagccgggggcgctttccggcgggcaacgtcagcgagtggcgcttgggcgggcgattgtacgcgaagcgggcgtgtttttaatggatgaaccgctctctaaccttgatgccaagctgcgcgtgcaaatgcgcgcagagatcagcaagctgcatcagaaactgaacaccaccatgatctacgtgacccacgatcagaccgaagcgatgaccatggcgacgcggattgtgattatgaaagacgggattgttcagcaagtaggtgcgccgaaaaccgtttataaccaacccgcgaatatgtttgtttccggatttattggatcaccagcgatgaattttattcgcggcacgatcgatggcgataaattcgttacggaaacgcttaaattaaccattcccgaagagaaattagcggttctgaaaacacaggaaagtttgcataagcccatcgtgatgggaatacgaccggaagatattcatccggacgcgcaagaggaaaataacatttccgccaaaattagcgtggcagaattaaccggtgcggaatttatgctctacaccacggttgggggcacgagttagtggtccgtgctggtgcgttaaatgattatcatgcaggagaaaatatcactattcattttgatatgacgaaatgtcatttctttgatgcagaaacggaaatagcaattcgctaaatacagggggaaggcattcccccaggataatacaaggaacaataatgaaaaagttattaccctgtaccgcactggtgatgtgtgcgggaatggcctgcgcacaggccgaggaaaggaacgactggcactttaatatcggcgcgatgtacgaaatagaaaacgtcgagggttatggcgaagatatggatgggctggcggagccttcagtctattttaatgccgccaacgggccgtggagaattgctctggcctattatcaggaagggccggtagattatagcgcgggtaaacgtggaacgtggtttgatcgcccggagctggaggtgcattatcagttcctcgaaaacgatgatttcagtttcggcctgaccggcggtttccgtaattatggttatcactacgttgatgaaccgggtaaagacacggcgaatatgcagcgctggaaaatcgcgccagactgggatgtgaaactgactgacgatttacgtttcaacggttggttgtcgatgtataaatttgccaacgatctgaacactaccggttacgctgatacccgtgtcgaaacggaaacaggtctgcaatataccttcaacgaaacggttgccttgcgagtgaactattatctcgagcgcggcttcaatatggacgacagccgcaataacggtgagttttccacgcaagaaattcgcgcctatttgccgctgacgctcggcaaccactcggtgacgccgtatacgcgcattgggctggatcgctggagtaactgggactggcaggatgatattgaacgtgaaggccatgattttaaccgtgtaggtttattttacggttatgatttccagaacggactttccgtttcgctggaatacgcgtttgagtggcaggatcacgacgaaggcgacagtgataaattccattatgcaggtgtcggcgtaaattactcgttctgataatgggctaaattgccggatgcggcgcgagtactttatccgatctataaatgtaggccggataagatgcgctagcatcgcatctggcattcaggcaaggtagctggtatttatttcagcgtcatatgcgtggcaacggtaatattctgtggtgacggttttccagaaattaagcggaataataactcgcagctttgttgacctaactcctgcgtcggaacatcgatgccgcccggtgcaggcgttaaaataaatgacagcgtttcattgctataacccaccaccgctaactgctgcggaatagcaatatttttctctgctgccgcacgataaatgctcattaatttcaggctgtcagtggcaaacaccgcctcaggcaacggtgactggcttaataattgccgtgctgcttttaatgcagtttcatgggtataaccgccatcaacaatccattcatcacgcactgcaatattatgcgcagccaggctctgcttataaccattaacgcgatcaaccgaaacatggacatcaagcggagcatgcaggcaggcaatattttgatgcccactttcaattaatgcatcggtcaacgcaatgctgtcgccaaaattatcggtatcgacagaataaacatgggcatattgaccttcaactttgccaatcaccaccaccggaatatcatatttatcgagttgggcaaaaaatgactcatccgctggcgaactgagcataataatgcctttaatcattttctgcttaattttgctttcgcatttttgcagatcttctgccggattgtgcgacgtttgtaatatcacgtcgaaaccttcttcttcagctttggcggtgatggcatgcaaaacttcagagaaaaacggattacccgccgtagttttggtcgaacgggtagaaatcaccataatggcatcaaaacccgaagaggtcagcgcgcgggccagcttgtttggctgatactgtaattcttcaatggcccgtaacactttttcgcgcgcttccggggagatattagtttgcttattcagcacgcgtgatacggtggattttgatacgcctgcaaccctggcaatatcataaatagtaggggacataggtcaggaactccgtccgaacgtgaatgctgcacatcttatggagttcgccggtcgatgacaacacgggcagttgataatcaatggcctggcccccacattcatatccttacgaatgattttttttctggtcttcagagcagcacaggacagcaatgaagcgacttaaaaatgaactcaatgcgctggtgaatcggggtgtcgacagacatctgcgcctcgctgtaaccggacttagccgcagcggcaaaacagcgtttatcaccgcgatggttaatcagttgcttaatattcacgccggagcacgtttgccgctgttaagtgcggtgcgtgaagagcgcctgctgggcgtgaaacgcattccccagcgtgactttggcattccgcgcttcacctatgacgaagggctggcgcagttatatggcgatccacccgcctggccaacgccaacgcgcggcgtcagtgaaatccgcctggcgctacgttttaaatcgaatgattcgctgctacgccactttaaggatacctccacgctgtatctggaaattgtggattatcccggcgaatggttgctcgacctgccgatgctggcgcaggactatttaagctggtcgcgccagatgacgggcttactcaatggtcagcgcggagaatggtcggcgaaatggcgaatgatgagcgaagggctggacccgctagcgcctgccgacgaaaaccggctggcggacattgccgccgcgtggaccgattatctccaccactgtaaagagcaggggctgcactttattcagcctgggcgctttgtcttgccgggagatatggcaggtgcgcccgcgctgcaattcttcccgtggccggatgtcgatacctggggcgagtccaaactggcgcaggccgataagcataccaatgccggaatgctgcgcgagcgctttaattattactgcgagaaggtggtgaaggggttctataagaatcattttctgcgctttgaccgccagattgtgctggtggattgcctgcaacctctcaacagtgggccacaggcatttaatgatatgcgtctggcactgacgcagctgatgcaaagttttcactacgggcagcgtaccctgttccggcgtttgttttcgccggttatcgataagctattgtttgctgccactaaagcggaccatgtgaccatcgatcagcacgctaatatggtttcattactgcaacaactgattcaggatgcctggcaaaatgcggcgttcgaagggatcagcatggactgcctggggctggcgtcagttcaggcgaccaccagcggcattattgatgttaacggtgagaaaatcccggcgctgcgtggtaatcgacttagcgatggcgcaccgctcactgtttatcctggcgaagttcccgcacgtttgcctggtcaggcgttctgggataagcaaggcttccagtttgaggcatttcgtccgcaggtgatggatgtcgacaaaccactaccgcatattcgtcttgatgctgcgctggaatttttaataggagataaattgcgatgaccgaaccgttaaaaccacgtattgatttcgacggtcctctggaggtcgatcagaatcctaaattcagggcgcagcagacctttgacgaaaatcaggcgcaaaattttgccccggccacgctcgacgaagcgcaggaagaagaggggcaagtcgaagcggtaatggacgcagcgttacgtccgaaacgcagcctgtggcgcaaaatggtgatgggagggctggctctgtttggcgcaagcgttgtcgggcagggtgtacagtggacaatgaatgcctggcaaacccaggactgggtggcgctgggtggatgtgccgctggggcattgattatcggcgctggcgtaggttctgtggtaacagagtggcggcgcttatggcgcttgcgacagcgcgcccatgaacgcgacgaagcgcgtgatttattgcatagccacggcacgggcaaaggccgcgcattttgcgaaaaactggcgcagcaggcgggtattgatcagtcgcatccggcgctgcaacgctggtatgcctcaatccatgaaacgcaaaacgaccgtgaagtggtcagcctgtatgcgcatttggtccagccagttttagatgcccaggcgcggcgcgaaatcagccgttcggcggcggaatcaacgttgatgattgcggtcagcccgctggcgttggtcgatatggcgtttatcgcctggcgcaatctgcgtttaattaatcgcatcgccacgctgtatggcattgaactggggtattacagccgtttgcgtctgtttaagctggtattgctgaatatcgcttttgccggagccagcgaactggtgcgcgaagtggggatggactggatgtcgcaagatctcgctgctcgtttgtctacccgcgcagctcaggggattggtgcaggacttctgacggcacgactcgggattaaagctatggagctttgccgcccgctgccgtggattgacgatgacaaacctcgcctcggggatttccgtcgtcagcttatcggtcaggtgaaagaaacgctgcaaaaaggcaaaacgcccagcgaaaaataatgcaatatcgggtgctgaccggatatctttacgccgaagtgcccgtttttccgtctttgtgtcaatgattgttgacagaaaccttcctgctatccaaatagtgtcatatcatcatattaattgttcttttttcaggtgaaggttcccatgcgtctggaagtcttttgtgaagaccgactcggtctgacccgcgaattactcgatctactcgtgctaagaggcattgatttacgcggtattgagattgatcccattgggcgaatctacctcaattttgctgaactggagtttgagagtttcagcagtctgatggccgaaatacgccgtattgcgggtgttaccgatgtgcgtactgtcccgtggatgccttccgaacgtgagcatctggcgttgagcgcgttactggaggcgttgcctgaacctgtgctctctgtcgatatgaaaagcaaagtggatatggcgaacccggcgagctgtcagctttttgggcaaaaattggatcgcctgcgcaaccataccgccgcacaattgattaacggctttaattttttacgttggctggaaagcgaaccgcaagattcgcataacgagcatgtcgttattaatgggcagaatttcctgatggagattacgcctgtttatcttcaggatgaaaatgatcaacacgtcctgaccggtgcggtggtgatgttgcgatcaacgattcgtatgggccgccagttgcaaaatgtcgccgcccaggacgtcagcgccttcagtcaaattgtcgccgtcagcccgaaaatgaagcatgttgtcgaacaggcgcagaaactggcgatgctaagcgcgccgctgctgattacgggtgacacaggtacaggtaaagatctctttgcctacgcctgccatcaggcaagccccagagcgggcaaaccttacctggcgctgaactgtgcgtctataccggaagatgcggtcgagagtgaactgtttggtcatgctccggaagggaagaaaggattctttgagcaggcgaacggtggttcggtgctgttggatgaaataggggaaatgtcaccacggatgcaggcgaaattactgcgtttccttaatgatggcactttccgtcgggttggcgaagaccatgaggtgcatgtcgatgtgcgggtgatttgcgctacgcagaagaatctggtcgaactggtgcaaaaaggcatgttccgtgaagatctctattatcgtctgaacgtgttgacgctcaatctgccgccgctacgtgactgtccgcaggacatcatgccgttaactgagctgttcgtcgcccgctttgccgacgagcagggcgtgccgcgtccgaaactggccgctgacctgaatactgtacttacgcgttatgcgtggccgggaaatgtgcggcagttaaagaacgctatctatcgcgcactgacacaactggacggttatgagctgcgtccacaggatattttgttgccggattatgacgccgcaacggtagccgtgggcgaagatgcgatggaaggttcgctggacgaaatcaccagccgttttgaacgctcggtattaacccagctttatcgcaattatcccagcacgcgcaaactggcaaaacgtctcggcgtttcacataccgcgattgccaataagttgcgggaatatggtctgagtcagaagaagaacgaagagtaagcgcgaatatgcctgatggtgcaacaccatcaggcatattaaattatgctttcagtacagccagagctgcttcgtaatccggctcggtggtgatttcatccaccagctggctgaaaatcacattgtcattttcgtcaataaccacaacggcacgcgctgccagacctttcagtgggccatcagcaattgccacaccgtaagcttgcagaaattcagcgttacggaaagtggagagggtgataacgttgttcagaccttctgcgccgcagaaacgagactgggcgaacggcagatcggcagagatacacagcacaacggtgttgtcgatctcagttgccagttggttaaacttacgtactgatgcggcgcaaacaccggtatcaatactcgggaaaatgttcagcactttgcgtttacccgcaaactgaccgagggtgacgtcagacagatcttttgccacgagagtaaaagtctgcgctttgctacccgcctgcgggatggaattggcgactgtaaccgggttgccctggaaatgaacggtttgtgacatgattatctttcctgtttacatatagttaacgtcacacctagtttatgctaactgtcaataacacagcaaacgctatttgcgcttaatccgcagaccaccgcgacaacaaggagtaaagatgagaaccgttaaggtattcgaggaagcctggcccttacataccccgtttgtgattgcccggggaagtcgcagtgaagcgcgcgtggtggtggttgaactggaagaagagggtattaaaggcaccggcgaatgcacgccgtatccgcgttatggggaaagtgatgcctcggtaatggcgcaaattatgagcgtcgtgccgcaactagagaaagggctgacacgggaggagttgcaaaaaattctccctgccggcgcagcacgtaatgcgctggattgtgcattgtgggatctggccgcgcgaagacagcagcaatcgctggctgatttgatcggcataacgcttcccgagacagttatcactgcacagacggttgtcatcggtacgcctgatcagatggccaatagtgcatcaacactctggcaggcaggcgcgaaattactgaaagtgaagctggataaccatcttatcagtgagcggatggtggcaattcgcacagctgtgcccgatgcgacgctgatcgttgatgcaaatgaatcctggcgtgcagaagggttggcggcgcgttgccagctattggcggatttaggcgttgcgatgcttgaacaaccgcttcctgcgcaggacgatgcggcgctggagaattttattcatccgttgccgatttgtgctgatgaaagttgtcatactcgtagcaatttgaaggcgctgaaagggcgctatgagatggttaatattaagctcgataaaaccgggggtctgacggaagcgctggcgctggcgactgaagcgcgtgcacaaggtttcagtctgatgctgggctgcatgttgtgtacctctcgtgccattagcgccgctttaccgctggtgccgcaggtcagtttcgccgatcttgacggaccgacctggctggcggtagatgtggaaccggcgcttcagttcacgacgggcgaattgcatctttaggatgccagcgcagcaagtttgccatcgcaaagagatatttttcgctggcttcgtcggaggagatgggcggaaactctgcggtgatgcaatgcaagttcagatctgcacaccaactgccgaaagagccaggcgtttcataaccgacgctggttaccagaggcaattcaaacgcctgagccagccattcgcctaattcgctgtgtctgggatcttcaatacaggccagtggatcgtggaatgagaccacccaggcaggttgaatgcggtgtataagctggcacagcgcctgggtttcaggttcggagccaggtttgtcacctgtcagtaatacgacatcgcgttcttcagcggcgctgttccagcgataaacggtttcaccttccttccagttcgccgccggaaagtttctgtttaaatccacaccattagcattggcccgtaaccccaactggcagccgtcaggattcacacacagcaccacatgatgacggcgcaaagaaggtgtcaacgtccgcagagcacaggagagcgtgacgaccgaagagttttcatcaccgtgagtgccagccagaatcaaaccactttcgcggctggctgcaggggcaggaaaccagattaacggcgcgcccaataatgaacgtccgtaatgttctgttccgggcggaaatgcgccgcgttcggcgcgtgggcgggttacggtcatgatcgtctctggttcaggaagtattacaggcagtgttgtgcaaattttgcggattatcaaatccttttcttcaacgctatgtcatcgatcttgtatcacttttttgccggaagttgtttgcattttattagttggatagggtttgtggatttttgctggctgacgggcaaataaagtttgtttaatggtttgcttatctgccagttgattaatcacatggcgggctatctgaccgccagcaccaagaatcagtacatttttcatgaaaattatcccagattattggcagcaatatgccagtccatatcactattgcggatttgaatatgtttcattacagagtttcctcaaagaacggagctaatactgaaattgcttcagccacataggctttgccgtcataaagatccatatggtttgcgccttcaacaatgtgatagcgtttatcctggcttgatgctcgatcgtacaggtcgtcactcatccattttctccctgcctggctgcccgccacaatctgcgtcggctgagtcaggtacacttccgccatatggtaagcatcataggtaataatctggttaaggctgcgcaaagtagcgtaacccggtgctgttggatactgcgcgcgaggggtgtggtaatactcccaggcctgacgcagttcttcgttcggcgcatcggactccttcattggtgccagtggcataatggcgtattctccgctgctaatatcgctggttctggcgtttgaacccgcttcaacgtatggcagggcatcaatagatttcacattgttttcccaaccattacggaatatcgaaccaatattgaccgcactaacggtaccgatggccttgatgcggcgatcctgaattgcagcattggctgtatatcctgcaccggcacaaattcccatcgcaccaattcgggtattgtcgacataagaaagcgttgtcaggtaatcaatcacggcactgatgtcttcagtacgaatgtatgggttttctaactgacgcggctcgccgccactttcaccttgataagatgcgtcataagcaatagtgacaaatcccttttccgccagttttttggcataggttccggccgtttgttctttaacgcccccacctgggtgagataacacaattgcctgatactgacgggtttcatcaaattttggagggaaatagatcactgcagacaaagagatggttggattattgctgttagtgaagctgactttattattcatcattccgttcctcatggagttgtcggttcgttttaacggttggtgatatcactatagatattgatcattaagttgattagacccaaaatcatgattagacctatcatttaaatgattaatagattgcatggagatactgaatgaagcgtgaagaaatcgctgatctgatggcgtttgtcgtcgttgcagaggagcgtagcttcactcgtgcagcagcccgcctgagcatggcgcagtcagctttaagccagatagtgcgtcgtatagaagaacgattgggattgcggcttctgacgcgaaccacgcgcagcgttgttccaactgaagcgggcgagcatcttttgtctgttcttggccctatgttgcatgacatagattcagccatggcatccctgagcgatctgcagaaccgcccatccgggacaatacgtattactactgtagaacatgcagcaaaaacgatattgttaccagcaatgcgcacattcctgaaatcgcatcctgaaattgatattcagctcaccattgattatggtttgaccgatgtcgtttctgaacgttttgatgcaggcgtccgtctgggtggggagatggataaagatatgatcgccattcgaatcgggccagatataccaatggctattgttggctcaccggattatttttctcgccgaagtgttccaacgtcagtgtcacaattaatagatcatcaggcaattaatttgtatcttcccacatcgggtacagcaaatcgctggagattaatacgcggtggacgtgaagttcgtgttcgcatggaaggtcagcttttactgaatacgatagacctgatcattgatgctgcaattgatgggcatggattggcgtatctaccttatgatcaggttgagcgggctattaaagaaaaaaaactgatacgtgttttggataaattcacaccagatttacccggttatcacctgtactatccacaccgtcgacatgctggctcggcattctcattatttatagataggctgaagtataaaggtgctgtttagcactacttgctgatacattaatttaattcttctcttaacgtattctcagttcctttcaacgttttggtcattttttattcttcgtacaatggcgacagatgctgattatgataccgaaaacgggtttgaacgtgcgaagcccgaacgtagtgttcggagttctatgtgctttaccgcattttggagactattatttacactaaatctgatttgatatattgatacttaaaacatttgatgcttcctttgtcacttttttgatggaagttgtttgcatttctttaaggcgaaacaaataattacgcatcaattttaatgtcggttagagggaaacttatgaagcactctgtttcagtcacgtgttgtgcgctgttggtcagcagcatttctctttcgtatgctgcagaagttccgagcggcacagtactggcagagaagcaggagctggtgcgccacattaaagatgagcctgcgtcgctggatcccgctaaagccgtgggcctgccagagattcaggtcattcgcgatctgtttgaaggtctggtgaatcagaacgaaaaaggggagattgtccccggcgttgcgactcagtggaaaagtaatgacaaccgtatctggacttttaccctgcgcgataacgcaaaatgggcggatggcacaccggtaacggcgcaagattttgtctacagctggcaacgtctggtggacccaaaaacattgtcgccatttgcatggtttgccgcgctggcgggaatcaacaacgcacaggcgattattgatggtaaagctacgcctgaccagcttggcgtcaccgcagttgatgcccatactttgaaaattcagcttgataaaccgttgccgtggtttgtgaatttaaccgctaactttgccttcttcccggtgcaaaaagccaacgtagaaagcggtaaagagtggacgaaacccggaaatctgatcggcaatggcgcttatgttcttaaagagcgcgtagtcaatgaaaaactggtcgtggtaccgaatacccattattgggataacgccaaaacggtactgcaaaaagtgaccttcctgccaattaatcaggaatccgcagccactaagcgttacctcgcgggggatattgatatcaccgaatccttcccgaaaaatatgtatcagaagctgttgaaggatattccggggcaggtttatacgccgccgcagctcgggacctattattatgcgtttaacacgcaaaaagggccgacggcagatcagcgcgttcgtctggcattaagtatgacgatagatcgccgcctgatgaccgaaaaagtattagggacgggcgaaaagccagcgtggcattttacaccagatgttaccgcgggatttacgccggaaccttcgccgtttgaacaaatgagtcaggaagaactgaatgcgcaggcaaaaactttgttgagcgcagctggttatggtccgcaaaaaccgctgaagctgacgcttttgtataacacttcagaaaaccatcaaaaaattgcgattgctgtagcatcgatgtggaaaaagaaccttggcgtagatgttaaattgcaaaatcaggaatggaaaacctatatcgatagccgtaacaccggcaattttgatgttatccgcgcctcgtgggtgggggattataatgaaccctccactttcctgacattattaacgtcaacgcattcaggaaatatttcacgctttaacaatccggcatatgacaaagttctggcccaggcatcgacggaaaataccgttaaagcgcgtaatgccgattacaacgcggcagaaaaaatcctcatggagcaagcaccgattgcaccaatttatcaatataccaatggacgattaatcaagccgtggctgaaaggttatcccattaataatcctgaagatgtggcgtacagtcggactatgtatattgtgaagcattgatgtgatgggaactggcgttacccttgtgcataacgccagtgatgtctgatttagcgaccctgttccggcggtgtaatgttatccatatacagcgtctggctggggaaggcaaagtccgcgccgtgtgactgtacaatatcgataatcttcaaataaacgtcttgctgtgcagcaagccattcagcccataccgtggttttggtaaagcaataaaccataatattcaatgaagagtcagcaaactggttgaaataaaccagtaaggtttgtcgctggtcgatggccgggtgatttttcagcatctcacgtacagcttcgacaataacgcccacttttgccgcatcctcataacgtaaaccaatggtcgtggtaatgcggcggttggtcattcgtcctgggttttctacgctgatcgacgaaaacagcgagttcggtacgtacaatggacgattatcaaaggtcgtaattttggtaattcgccagccaatttccgctactgtaccttcgatatttctgtccggtgaacggatccagtcgccaatactgaaaggacggtcgaaatagagcataatcccggaaaagaagttactcagaatatctttaccggccataccgacagccagaccaccaataccaccaaaggtcagcaagccagaaaggctcatgccgaaatgttcgccataaagcagaacaagcaccacaataatggtgattttgatgatacgcgacataatccgcgcactggtgatatcgcgaccttttttaatctgctgtttttcaaactgattaatcagcagaaatagcttaatcgtcagaataaccgcaatcagggacgtacagataaaatcgataacgcctggggtgataaatttgagtttatagttttctataacataattaataatgctaccaacagcactgataattatggtgtagattaaaaattgcaccgcatggaataaaaatccttttcttttacgatttccacggcgaaaccaaaagctcatcagaatcaatgctgcgcagctaccgaaaataatgaccagattaagcgcattatttgtaaacagttcagcgatcattgttttatcaggctcctccagataattgtcgtcatgccggaaacccctggcggggctattttaccgcgacaattcattcagatcatcaatagtcagggaaggaagtagcaacattagctaaggaaggtgcgaacaagtccctgatatgagatcatgtttgtcatctggagccatagaacagggttcatcatgagtcatcaacttaccttcgccgacagtgaattcagcagtaagcgccgtcagaccagaaaagagattttcttgtcccgcatggagcagattctgccatggcaaaacatggtggaagtcatcgagccgttttaccccaaggctggtaatggccggcgaccttatccgctggaaaccatgctacgcattcactgcatgcagcattggtacaacctgagcgatggcgcgatggaagatgctctgtacgaaatcgcctccatgcgtctgtttgcccggttatccctggatagcgccttgccggaccgcaccaccatcatgaatttccgccacctgctggagcagcatcaactggcccgccaattgttcaagaccatcaatcgctggctggccgaagcaggcgtcatgatgactcaaggcaccttggtcgatgccaccatcattgaggcacccagctcgaccaagaacaaagagcagcaacgcgatccggagatgcatcagaccaagaaaggcaatcagtggcactttggcatgaaggcccacattggtgtcgatgccaagagtggcctgacccacagcctggtcaccaccgcggccaacgagcatgacctcaatcagctgggtaatctgctgcatggagaggagcaatttgtctcagccgatgccggctaccaaggggcgccacagcgcgaggagctggccgaggtggatgtggactggctgatcgccgagcgccccggcaaggtaagaaccttgaaacagcatccacgcaagaacaaaacggccatcaacatcgaatacatgaaagccagcatccgggccagggtggagcacccatttcgcatcatcaagcgacagttcggcttcgtgaaagccagatacaaggggttgctgaaaaacgataaccaactggcgatgttattcacgctggccaacctgtttcgggcggaccaaatgatacgtcagtgggagagatctcactaaaaactggggataacgccttaaatggcgaagaaacggtctaaataggctgattcaaggcatttacgggagaaaaaatcggctcaaacatgaagaaatgaaatgactgagtcagccgagaagaatttccccgcttattcgcaccttccctaactaatcaatgcgttgattgtaaatccagctaagaggtgaggttttcagagcagacaacggtgaaatgtcatggtattgttacgtttaggtaacaagaaatttgtctgcacaaggattacatcatgattatggcgaaactgaagtcagcgaaagggaagaaatttctctttggtttgttggcggttttcattattgcggcgtcggttgtgactcgcgcgaccatcggcggcgttatagaacagtacaatattccgctgtctgagtggacgacatcaatgtatgtgattcagtcatcgatgatttttgtttatagcctggtctttactgtgttgctggcaatcccgttgggaatttatttccttggcggcgaagagcagtaagtaaaaaataggcccgataactcgggccttgtcagttattgaagagtcgttaatcgtcttcttcgtcatccagttcaacgggtgtctgatactggtcaggtttaatgaccagcaggtcgcagcgaagatgatcaatcacctgttccgccgtgttgccgaggaatgctgctgaaataccggtgcgtcctaccgtgcccagaaccacaatccccgcctgtaagtgctccgccaaatcaggaatcacctcttctggcagacctttttctacgtgcgtcatgttttcattaatgccgaatttctgccgcagggctttcattgccagcaaatgttgcccacgaatggcatcgttataaacgctcgggtcaaattccggcagttcaatcgcgatattaattggcgttaccggataagcgccaaccagatgaacttcggtatggttgacttgttctgccagttcgatcgtctctttgaccagtttttcattgagcgcattatgatacggctcttcactggcgagattcaccgccaccagcgccttgcctccttccggccacggctggtctttcaccatccacaccgggcttgggcatttgcgtaacagatgccagtccgttggcgtaaaaatcaccgcttccagacggtcatgttggtgcgccatttttagcaccaaatcgtgtccgccgctgatcacttcctgaatgatggcttcgaaaggacggttatgccagaccactttaatttcaatgggaacgccagcattgagataatattttgcctgctcgtggatccaggctgtacgctggctgatgacgccctgacgcatagcggtacgttcgtccggggagagcagggtggtcatttcgtatgagaagtcatagatcggcaaaaaggctttaattttgccaccaatccgttgatgtaaataaacagctcgccgcaatgctggttggtcgtcctggttaggatcgataacaacgagcatgttctgatacatagccatacagggtctccttacaacaactgtcaacgcagtttgtaattaaaagattaacccatatctggtgaatgaaacagtgatgaaccttctgccagatcaataaatcagaaaaatttaatgatatgacagaaggatagtgagttatgcggaaaaatcaggcaacgttacgcgtatgaccagcaagctgggccagcgcatcgttattttcgatggtgatgtatttacctttgactgccagcatgccgcttttctggaagcgacccagcagacggctgatggtttctaccgtcaggcccagatagttaccgatatcgccacgagtcatcgtcaggcggaattcacgaggggagaagccgcgttgggcaaaacgacgggacaggttgtagatgaatgcagccagacgttcctcggcatttttcttcgacaacagcaggatcatgtcctgatcgcctttgatttcaccgctcatcagacgcatcatctgctgacgcagattcggcattttaccggacaaatcgtccagcgtttcgaacgggatttcacataccatcgaggtttccagcgcctgcgcgaagctcgggtgatggccgctgccgatggcgtcaaatcccaccaggtcgcctgctaaatggaaaccagtgatttgctcgtcgccttgctcagtgatggtataacttttaatcgtaccggagcggatggcataaagcgatttaagttcatcaccagccttaaacagcgtctggcctttctgaataggcttcttccgctcaatgatattatcaagctgatcaagctcatgttcgttgagtgtgaacgggatgcaaagctggctgatgctgcaatcctggcaatggatagcacaaccgccagactgaatgcgccgtataattcgcttttccgggatcataggtctgctcaagccgtaattgatatttgtcaattttaacatctttttagggagcaagtaagtctaagcaaaccttaacagcagagaattccgatattagatgtaaatatatgtctatctatttgaaaacccttaagttgttaagggtaactttacataaaagtgtgaacaagctggcacaaattgtttaatgtttacagcaaaagataaccttcatggcgcaataaccactcttttcgctgaactccgcctgcatatccggtcatggtgccgtttcggccaataacccgatggcaaggtacgacgatgctgatgggattcgatccgtttgccgcaccaacggcacgcgccgcgccaggacggcccaattgctcagccagttggccgtaatgcattacctgcccgcaggggatagtgcgtagtgttttccagacttcgcgctgaaatggcgtcccccccgtagcagtgggaagcgtatcaataatgctaagattaccggcaaaatattcacgaagcttgtcgcttaaaccgcctggattggtggcagaaatgcgctcatagccttctttgcgataatggatgtccagcagctgcaccatgcgttcgctgtactcttcccattcaaccgcccgcaggcgaaattgctcatcgcaaatcacccacagtggacccagtggcgtggcaattttttcttcaagtaatctcagcatccgttctctcttaagacaaacgtgggtaaatacccggacctatcggcagaccgacaagataccacgccagcaacatcagcagccataccaccaaaaagataagtggatagggcaagactaacgaatagtaagtacccagtttcgcgtctggtttgtagcgttgcaggaatccaagaaacagtggaacaaaaggagataccggcgctaaaggcaatacggatgagtcggcaatacgaaagaggatttgcgcaaatgccgggtgaaagccaagtagcataaacattggtacgaaaatgggggcgagaatcgaccagattgcggaaccgctggcaataaacatgcataagaaagaggaaagcaacgccagaccgacaaacgccgggatgccgctaagccctgaactttccagtatatcggtcagccccacggcgatgaatttccccatgttgctccagttaaacatggcgacaaattgggcgaggggaaaaaccatcacgataaatcccgccatctctttcatcggttcaatcattaaatgcggtaaatccgcctgacgtcgaattgtgcgggtagcgatgccataagccagcgagacaacaaagaaaaaaagaatgatcagtggcacgatacctttaataaagggtgatggcatcacggtgtgattaatcggatcgcgcaatatcccgttttgcgggatcaccatcagcgcaatcgcagcaataaaaagtagcgatacgacacctgctatgcgtaaaccaaaacgctgactttcggtcaatgtctgcagtttctcatcgctgtttccctgccattgacctaaccgtggctcgatgattttgtcggttatcaggccgccaacaatcgtcagtacgactacggagctggccataaaataccagttatcaattacactgacgtgcatttgcggattgaacgcagctgccgcttccgtgctgatccccgacagcaacacgtcggttgtgacaatcagtaaattagccgtaaagccgcaacctacgcctgcaatggcagccagtaaacctgcaactggatgcctgcccaccgccagaaaaatcagcgcacccatcggtggcatgatcactaacgccgcatcggaagaaatgtggctgaaaaaagcaataaacagcaccatataactggcgtagcgggcattaacatgcgatgccattttaaccattagtgctggcagtaagccgacgcgctccgccagaccggcacctaaaaccagcgccaggatcgcaccaagtggagcaaaaccgctaaagtttttaataacattgggtaaaaaccagtgtaatccttccacactgagcaggtttttcaccacgaccggcgtaccatcggtcgggtttttcgcactgacgccaaaggccgacaaaattgccgtcgtcaccatgagtacgataatcaaatagataaagagcagaaaaggatggggaaccttgttaccaattctttcgacccagccatagagcttcccggattgggaggacgacggtatggatgacatactcatgggcattcctcggttgttgtgtttgcgttgttgttgttattttaaaggtgacggtgtcacgtttttcgggatagggcagtgatacggttgcgtgtccgttacttgctgatgctcttgttggcattcttgcaatagccctgaatcaaggaagagattgactgtggttgctgccatagttttcgccgccagcagcattcctttatgagcaatagatgttcgcccctggctaaccagttgccacgtatgtagcggtgtaccgacggcaaaacaggggctgaaacactgggcaacaggcagtttccaactgacgtcgccgacatcagtcgatgccgcaagcacgttatcggtggcggcatatggagcgacttcattcgccagtaccgtttcacgatgacgtagtgcaaaaaccttgccgttttcgccaccggttgcggcgatattattcagactgttttgccgatcgttggaggtgagcgtagcctgaatttgtttcgcaaaagccagttcttcggagttccattccggggtaccaaaatgggatagggcctggtacatggcattttctaaggtgcgattcgggagataactggaacaggctttgtcgaagcggcattcaaccgtggtttcggtcatcaatgccgcaccttcggcgattttggcgacccgatcataaatatgctgcacgtcggtcatttcgggggcgcggataagataaagcacttctgcctgcgcctggaccacgttgggcgagatcccgccgctatttgtgatggcatagtgtacgcgcgctttttcaataatatgttcgttgaggaagttggtgccagtggtcatcaacgttacggcatcaagggcgctgcgtcccaaatgaggggaattcgcggcatgtgctgcgatccctttaaagcgccatgatgcctgaatgtttgccagcgtgcgggtattgaacataccggcaaaggcttccgggtgccaggtgagtgccgcatccacatcatcaaataccccctcgcgaaccatgaacgttttacccgagccgccttcttcgccaggacaaccataaaagcgcaccgtgccgccttgcccatattgttccagccatttcttgacggctattgcagcggcaaaggcggcggttcccagcaaattgtgtccgcaaccgtgaccattttcaccgggcgtcacggatgtaggttgcgcgcaacctgcttgctgacttaaacctgccagggcgtcatattctcccagcagggcgataaccggtttgccttgaccaaacgaagcaataaaggcatttgggatattgcctacgttgcgggtaacggtgaagcctgcagattccagcgccgaagccagatgctccgctgaccagaactcttcaaaacgtgtttctggatgatcccagatttgatcggcaatatcggtataacgttggcgatcggcttcaatcgcatcgtcgataaaacgatagatttcctgcatcagatacctcgcgtccagggaaaattgagcgcggtgcgcgccagcgtttcgacggcaatagcgagaacctgctcgtcaaaatcgaatttttcgttgtgatgacctgccgccagctgtgtgccaaacaccacgtaggaggcttgcccttgatgttgctgcacgcgggccatcattaatgtggcatcttcggaacccgcaggcgcttcaacacgttcaatggcctgattgacccccgcgacctgagccgcctgactttgcaaccatgcgacccattgcggcgaaggagaactggcggtagctgcacccatcagacgagtttcaacgccgacaccatacatggttgctgcgccctgaatcgcttgttgtgcacggtcaaaaacatattgattaatgacgtcgctggccccgcgtgtttccactttcagcaacgccgaggcaggaacaacgttacgaccgcttcctgcctgcataacgcccacgtttactctggaagctccttcgctgtgcggggcgattgcatgcagtgcaagagtggcttgtgctgccgccaacaaggcattgtgaccgtcttctggttttgcgcctgcgtgagcggcggtaccggtgaagtgcgcgtcaaatttggtggttgccataaaattatcactgccgcacaccacggtgcccgcaggtacgccagtgccaatgtgcacggcagtaaaataatcaacatcatctacgacacctgcatcgaccatcgcccgcgcgccacgcgtaccttcctctgcaggctgaaaaatcagtttgatgacgccatgtagtccggactcgaactgtttaagggtatgcgccagcccaagcccaatggcggtatgtccatcatgaccacaggcatgcatcattccggcgttacatgacgcaaaaccgtcgcggtaggggcgatggctgacatcctgctcttcactgagatccagcgcgtccatatcgacacggaaagccatcaccggaccggggcgaccggtatccagggtggcgacgataccagtgaaaccaccttcaaaagccgcaatccattgtgctagcgcaccctgttgacgagcgcgctcgaattcgcgttgtagagtgaattcatcaggtaatcccatccggctactttcattaactacttcgcgacccagcgccagtgaatagccgagctggtgcaattcttccgcaacaagggtggcagtgcggaattccacccagccagactctgcatagtgatgaaaatcacgtcgccagtgcgataattttggggcaagcgaattaacaaattgattcaaagactccataacctttcccgtcatcagtaaaaagtgtgacccggttcacgtagcgatagtttttacttatcactaactgatttttcacagttttaaccgttcataaattaccctgacacaatcatctgcattaaagtagatgccagtttctttggtctgataaataacggttatcggtggcgtcatggcttttcaggtaaaaattcatcaaattcgggcttttgttgaagtggctcgtcagggcagcattcgcggagcgagccgaatgttgaatatgtcgcaaccggcactgagtaaatctattcaggagctagaagaagggttagcggcgcaactcttttttcgccgtagtaaaggcgtgacgttaactgatgccggtgaaagtttttatcagcacgccagtctaattcttgaagagctgcgcgcagcccaagaggatattcgccaacgacaagggcaactggcagggcagattaatatcggcatgggggccagtatttcccgcagtctgatgccagctgtcatatctcgttttcatcagcagcatccgcaggtaaaagtacgcattatggaagggcaactggtgtcgatgattaatgaattgcgtcagggagaattggatttcaccatcaatacctattatcagggaccgtacgaccacgaatttacttttgagaaattactggaaaagcaattcgcgatcttttgccgcccgggacaccccgccattggtgcccgttcgatcaaacagttactggattacagctggacaatgccgacgccacacggcagctactacaaacagttgagtgaattgcttgacgatcaggcgcaaacgccacaggtcggtgtagtctgcgagacgttctcagcctgtatcagtctggtggcaaaaagcgattttctcagcaaactgcctgaagaaatgggctgcgatcccttgcacggacaggggctggtgatgttgccggttagcgaaattttaccgaaagcggcctattatttgattcagcggcgtgatagtcgccagacaccactgaccgcgtcattaatcacgcaattccggcgagaatgcggctatctgcaaagttaaaactgcataaaaaaatagagtctgtcgacatccgccagactctacagtacacacagcagtgcatccgcgtcttaaatccggcattgtctcctctgcgccggtgactgtgttataacggttttaacctttagttgccaattttcttcagtgacagatttcacgaaaatataagttacattattaatatcgtgaatgaataatcatgcataagtattttgcttaaaatatcggcaatatttggaacttattactggaaatttgggtaatacgttgttggaccgacccggtctggttatcatatcgcgctcttaattgcgggaggatgtaacatgaaccttgacgacaaatcgctgtttcttgacgccatggaagatgtccagccgctgaaacgtgctaccgatgtccactggcatccaacgcgtaaccaacgtgcgccgcagcgtatcgacacgctgcagcttgataatttcctcaccaccggatttctcgacatcatcccactaagtcagccgctggagtttcggcgggaagggttgcaacatggggtgctggataagctgcgcagtggtaaatatccgcaacaggcgagcctgaatcttttgcgccagccggtggaagagtgccgcaaaatggtgttcagttttattcaacaagccctggcggatggtttgcgtaacgtgctgattattcatggtaaagggcgggatgataaatcgcatgccaatattgtccgcagctatgtggcgcgctggctgaccgaatttgatgatgttcaggcatattgcaccgcgctaccgcatcatggcggcagcggggcgtgttacgtcgcactacgtaaaacggcgcaggcgaagcaagaaaactgggagcgccacgctaagcgcagtcgttgatctcgagacgcatccgcggcttatgccgccagcacgcggttgcgtccatcatttttcgcccgatacaaagcatcatcaacgcgtttaaacagttcatcgatgctttcatttccttcgtgatgcgccacaccaatgctgacggtaaagcgtggtaagcccgaaatactcacttttgccacgcttacgcggatagtttcagccagcgaaagcgcggtatccagtggggttcttggtagcaataagacaaactcttcgcctccccaacgaaacaccaaatcgcctttgcgagcgcaactttcgagggtgcgggcgagggcgcataacacctcatcacctttagaatgcccatagagatcgttaatgtgtttaaaacgatcggtgtcgatgagcaacaagctgtaatcctgagcgatggcgagatgctgcatttggcctggttccgtaatgtgataaaactgtcgccgattcagtaatccggtcatcgcgtcatggtgagcagcatgttccagctgctcctccagccgtttttgctcagtaatatcatgcacaatacataacatgagcttgtcgccataaatttcaatcggtccggcataggtctgcacatgacgagtcgaaccatccgccagtttatgaacaaaattcaaaggtttatgaccaccgggtaaatgcgagatttcatgcatgataggcatgacgcgacgcccgagcatatttatttcccaggtatgtttctggcacatcgtttcatggttataaccatagaaattgagcgcggcgaggttagcatcgacgatttgtccatctcgtgacgggtcaatcaacaacattggtgcagagttagtcagaaaaaagcgcgcataaaaaccttgttttttgcgctgataatttgccgagcgactggcttttaaacccagcgttgccggcgcttcgataccttcgaaaataatcaccggttctgtttctgtcagctttcgcaaaacaagccgacagctcaatgctgtttcctcttctttacgctgaacagtgaggatttcgataatatcgtgttggttttgcagatcggagaggtatttcggcagttctttttgtgaggagacggaatagggtccggttcgtagctgactaaacgtgaggtcttgcatcaacagtttcgccgcgctattggcataaattaactgttcctcaaagggcgaaacgatccagacaggactggtgagtaagtccagggtattgaagttgtgcgtaatcattgagatcccgttatttttatcaatttttgttgctatccgatcgcaaaaaagccacgtcatatgatcagataattctgataatgatagacgctatttaacacttcacacggtttgtatacggaaaagcattttgctttttgtattcaatttagacagaattttattaatcatttcagggtaatggggtgatgagatgttgcgtaacagggccagaaggctagactacaaaataatgcgttgatgatggaggcactgtggaagcgattaagggatcggacgttaatgtcccggatgcagtatttgcctggatgctggatggtagaggcggcgttaaaccgctggaaaatacagatgtgattgatgaagcgcatccctgttggctccaccttaattatgtacaccatgatagcgcccaatggctggcgacaacaccgctgcttcccaataacgtacgtgatgcgctggcgggcgagagcacgcgtccccgagtcagccgtctcggtgaaggcacgctgattacattgcgctgtataaacggcagcaccgatgaacgccccgatcaactggtcgccatgcgtgtatatatggacgggcggttaattgtttcgacccgacaacgcaaagtgctggcgctggacgatgtggtgagcgatctggaagagggcacgggtccgaccgattgcgggggatggctggtggatgtgtgcgatgcgttgaccgatcattccagtgaatttatcgagcagctgcacgataaaattatcgaccttgaagataatctccttgatcagcaaattccaccgcgtggattcctggctctgctgcgcaaacaattaattgtgatgcgtcgctatatggcaccgcaacgtgatgtttatgctcgtcttgccagtgaacgtttgccgtggatgagcgatgaccaacgccgtcggatgcaggatattgccgatcgccttgggcgcggccttgacgaaatcgacgcctgtatagcacggactggcgtgatggcggatgaaatcgctcaggtgatgcaggaaaatttagctcgtcgtacctatacaatgtcgttgatggcaatggtctttttacccagtacctttctgaccgggttatttggcgtcaaccttggtgggatccctggcggcgggtggcaattcggattttcaattttttgtattctgttagttgttcttattggtggtgttgctttatggttgcatcgtagtaaatggttgtaacaaaagcaatttttccggctgtctgtatacaaaaacgccgcaaagtttgagcgaagtcaataaactctctacccattcagggcaatatctctcttgcaggtgaatgcaacgtcaagcgatgggcgttgcgctccatattgtcttacttccttttttgaattactgcatagcacaattgattcgtacgacgccgactttgatgagtcggcttttttttgcctgttatttatcagcgtctaccctttaagagtccacccaatgaccagagggaaatatgacgacacttatttatttgcaaattcctgtccctgaaccgattcctggcgatcctgttccagtgcccgatccgatccctcgcccgcaacccatgcctgacccaccacccgatgaagaaccgattaaattgtcgcatcgtgagcgtagatctgcgaggatacgcgcctgctaactttgcgtcgatgaccacgagaatagattgtgaccgctttttctaccctgaatgttttgcctcccgcccaactcacgaaccttaatgagttgggttatttaaccatgacgccggtgcaggccgccgcgcttccggcgatccttgccggaaaagatgttcgcgtgcaggcgaaaaccggcagcggcaaaacggcggcttttggcctcggcttgttacagcaaattgatgcgtcgctatttcaaacccaggctttagtgctgtgtcctacgcgtgaactggcggatcaggtggcaggtgaattgcgtcggctggcgcgttttctgccaaataccaaaattttgacgttgtgcggtggtcaaccgttcggtatgcagcgtgattcgttgcaacatgcgccgcatattatcgtggcaacgccggggcgtttgctggatcacctgcaaaaaggcacggtatcactggatgcgttgaatacgctggtgatggatgaggccgaccgcatgctggatatgggatttagcgatgccattgatgatgtcatccgttttgcgcctgcatctcgacagacgcttctgttttcggcaacctggccggaagccatcgctgcaatcagcggacgagtgcaacgcgatcctttggcgattgaaattgactcaacagatgctttgccacccattgaacaacaattttatgagacatccagcaaaggcaaaattcctctgttgcaacggttattaagcttgcatcagccatcctcttgcgtggtgttttgcaataccaaaaaagattgccaggctgtctgcgacgcgctgaatgaagtagggcaaagtgcattgtcattacacggcgatttggagcaacgcgatcgcgatcagaccctggtacgttttgctaacggtagcgcccgtgtactggtcgcgactgatgttgctgcgcgtggtctggatattaaatcgcttgagctggtggtgaactttgagctggcgtgggaccctgaagttcatgtacatcgcatcggtcgtacagctcgtgcaggaaatagcggtctggcgatcagtttctgtgctccggaagaagcacagcgggccaatatcatttctgacatgttgcagataaaacttaactggcaaacgccgccagctaatagttccattgcgacgctggaagcagaaatggcaacgttgtgtatcgatggcgggaaaaaagccaaaatgcgcccgggtgatgtattaggtgcactgacaggagatatcgggcttgatggcgcagatattggcaaaatcgccgtgcatccggcgcatgtctatgtcgcggtccgtcaggctgttgctcataaagcatggaaacagttacagggcgggaagattaaaggaaaaacgtgccgggtgcggttattaaaataatgaaatgttgaattgccgggtgcaagagtaaacatcttattcgggattgccggatgcgacgctggccgcgtcttatccggcctccataagagtagcccgatacgcttgcgcatcgggcgctatcctggttatttcacttcaaccacattcagccgtaactcatccaactgattttcatcttcttctggctgccagcacgccggttgtagtgggatctcttcgcgatcaaacgccagatcacccccgttaaccacttcagaaccgtgggtgatgcctttgaaatcgaacaggttggtatcgcacagatgcgacggcaccacattctgcatcgcgctgaacatcgtctcgatacgccctggataacgtttatcccagtcacgcaacatgtcagcaatcacctgacgttgcaggttaggctgtgaaccgcacaggttgcacggaataatcgggaacgcttttgcatcggcaaatcgctgaatatctttctcgcggcagtaggccagcggacgaataacgatatgtttgccatcatcgctcatcagtttcggaggcatacctttcatcttaccgccgtagaacatatttaagaacaacgtttgcaggatatcgtcacgatggtgacccaacgcgatcttcgtcgcccccagttccgttgcggtacgataaaggataccgcgacgaaggcgagaacacagtgagcaagtggttttgccctctggaatcttctctttcacgataccgtaagtattctcttcaacaatcttgtactcaacgcccagcttttcaagatactcgggcagaacgtgttccgggaagcccggttgcttttgatcgaggttaacagccaccagcgaaaaattgattggcgcgctttgctgcaaattgcgcagaatctccagcatggtatagctgtctttacccccggagaggcaaaccatgatgcgatcgccttcttcaatcatattgaagtcagcaatggcttcgcccacgttacgacgcagacgtttttgtaatttgttcaggttgtattgttctttctttgtaatttgttgattttcttgcattatttcagttctctggtactaaatggggcaaattgggggcaaactttgcaactacgataaccgcgcattcaacatggctatctgttcgtcgttcatgtcatcaatccacataccgtaaatttcatacaccatctgcgcagtttcatgccccatttggctggctataaatgccgggttcgctcctgccgtcaacagccagcaggcaaaagtatgccgcgtatggtacggattacggcggcgaataccagcacgttttactgctgcattccaccttgcccccaaactgcttaccgagtaataaggtttttgttttccgttacacaccctgggcatgaaaacaaaatgcagtttttgcttttcggttctgccgtactcccgatgataaaaggtgatttcgcttttgcgatgatgcccggtcagtttgtattgctccttcagtgcttcaagagcaggctgcagtagtgttactgttcggatcccggcatttgtttttgggggaccgaacatatcaagtatcgtcaggtttcttctgacattcactattcccttttcgagatccacatcctcccacgccagagctgccagttccccgtgacgaagtcctgagtaaacggcaaatttccacaagttctggctctgtcctttttcactttccattaatgcattgaattctgttttagataacggatcaggctttattctgtttcgctgtaatttttttactccttcaaatggtttggttgatataaatcccgactgatacgcaaaacgcaacagcgaacagagcagggcgatatagttatcaactgtgcgcacggttcttccttttttgttggatcttggattatccaggtaaagcgtttctccatgcagcagttcattccggtagtttaagatatcgctataacgaatatgtgatatcggggtactttcacaaattattattctgagtgtttttaattgtgatttcgttttcttcattgtgtttgttgttaactctgtctctttaatttttgtccagatatcacaaagctctccgaacgtttttatgactctcgttgtcaccatttttgccccagtgctggactggggaaaacgtcttaaatactcaaattcaccggagtttatttcatgaactatcagcgctcttaaatttccggcctttttaatattactgtttgtaatctcccagccttttaatgtttcccgacatcgttttcctcgaaacatgaaccagatgcgaatgtatctacctctaatctcgacacctgttggtaatttagacatatcatgagtctttgataaactgatttatctttggatagttgtaccagataatccctcgtttgctgtctggcttacctaaaggagatactcgtttgaagtggaagccctccacccaacagttctggcggtatgcttcaatttgtctggcccccagaccagtgcgaagcatcaggccgtattcaaccatccactcttcattaaagattacttgtgccatcgcatcacctctggcaggcgccaatgttagactgaaattgacgcccgatgttgattattaataatcagctatgaagttttaatttgaatacaatgcaattctcgaggactgaagtttctcgcaattaaaatttatcagttttactttctgctctctggaaacgcctgcttcttttttacctgagagcattttttcgcattctgatttcgttagtttagattttgaatatcttgtccagttagtaggagtgccaccttccttttcaatagtggcggtaattttatacatgaacacctccattattatttccagtggttcgtttattccatctttcgagtgcttctttttcacttccaccataaccggttcgggattcgcatccgttacacttcgctcggtaatatcctgaaatggctttcaccgttactgatggacaaccacaaaatggacatggtttaacattgtcatatctcataatttttctcataaaaaatatttcaagttggcggtgcattacaccgccaggctgaattattcctctgaattatcgattacactgtattccccggttaatacagaggaatctgcaggatcgattgtcagtggttccttttcatccattgatactgcacgctggatctcaattgatacgggcaaatatttgaacaggcgacgaatagccgttttctttgccatttcttcccagtgagttacccacggcccgttattaccagctttactcaggctgcgcaccagctcaatctgtttgcgcgtcataacttcaaactgagtacctccgtctttcagtcttgcgacagcatagacgtgggtaaccggggcatcttcgttttctcccgggcggtgtattaacttttcatcaaggccaaattcgaagctaaactcgtcaccttcacggacaacacgggctgacaggctggcgatttgaccagaacggcgagccagatcaatcatgccgcgatagccaatgattagctgaacgttctttttaccgctcttttcgtttttattaccaaaaggcagtaaatatgcatgaccgagggcgctacctggctcaagtccgagctgtgaacactgtacgatcgcactgacaaaactcatagtgtcacagtttcctaacgccggaactttacgaatttctgtggtggcgatacggatcatacgttcagccgtcatatggcgtggaagagctgctgccagttgctctttcattgatggctggttaataaaactaatcacgtcgctatttttaactgctgctggtgcacggtttccctgagttttttgcagatcggcttttgcgattggtggttgcttagtcatttgcatattccttagcccagcggggcagtgataatgtcttaatagctggccattcatcggtattcaggcagtcagacagggttcgcagattgcggtgatattcctgttgacctgccagttttgcttcttcgcccatcatgaaaatttcaaccggataacgtccgcattcaatagttgtgctggcaaccagaaaaacgaaagttggctgcactccaaactgtgcttcataaccgtcactgtagaatgcatcctgaacgtgatagcggtagtcgtaataagcggttttgaatcgttgaatatccgccgtagttttcacgtccatgatccagtgaaattcagggataattttgtccggacggcaccgacacaaaattcctgtttcaggatcttcccagtaaattgatgattcagcgtgtccggcgctttcaacaagccattgccccagcggcaaagccataacgctttgatacatgagttcaattttccggccttcttccgcagtgataaccgtttttcctgtgcttgcgcattccatcagaaacgctttctcttcttcttttccggcgtttgtacggcggttaaattcaggtgctacgataaagcggttactgaattcttccggttcaagtacccggcagtggaaagcagttcctaaatcgagcgtttttgtctttgtggtgtccacgggggcatttttacgccacaaatatagtgccggagtatcagcaatgtcatcgagctgagacttactgataccgggacccgcgtggtaattctcattcgaaattccgtaataaatacctggctctatgtcttctacgattacgggatctgcgacttcgccagtttcatcactgcaatcgcgatgcggatcgctgccagcattctcattgtgcggatgttcagcgccttccatttcctccggatcattttccttagcttcaacctgactctcttcatcgaatgtttcctggtatgttgcgtcgcccatcaccgcaccacagtcagggcagttatccccgccagtctggccgcaggcattgcaggctatttccggttcctgttgcactactggctcaggttgattcatatctgggctggttttttccgtttctggctggttctggtacacacaatcgcgagtctggatcccctttacccatttcggatcgttcgggtcgctaattccgtcaacaaattcaccacgtgatgcagcaagcaatttatcgtcatcgacaggattttttgatggaatgtttttccgggcttcatggagttctgcccgcagttcctgatatttcgcatcaacagaatttacctgtgactgagcatccagcggctgcgtgtcctgatgatgttcagttgcgtccggttccattgtttcagcctctccctgttcaactgccgttgttccagatggttgcggtttttcttcatcatcctgttttccttcttctgttactcgctgcggcatcggggcagaggagcgaccgcaggcaatatccacgatttccggatcagggttggcatgatcggtttcagtcagtactttgttcagatattcagtgacgtgcgcggggatgacctcgatcccaattggtgcttcttttacggacgcaaccacgatggcgcgggaataatccagcccgccaggcatggtgatgaatttgtcgcggaaaacagaaaagggcggtttattttcagcgataatttcctcaatgcgtttagcgtgtgccggatgaaggttatagatgtccagatccattgaacgggccagtacgccagtggctacgtcgcgcgccagtgacgtcagatcgtgtacgaaaccttcgccgcgatcggtgaggtttccgccgccagcattagcaccggaagccgtgcgagtgatgtgtgaaacacgattacccttcatccactcttttgtcagcagtcctcgatcggtgtagtcagcgttcaggtatgcttcgaaaaaagcagttatcagtcccaggtttgaattaccaggattagggaaaactttgtcagtgtcacgaaccagtttgtggagttcgcgaatttccagcgggtcgagcaggctggttttgtgggaaacagccagggcagtaacagccggtagttcttcagcccgagcaatgtgtaatgcctggagtccgtcgcgtgaaacgtgcgttaccggtttttcgctgccgtgttgagcaagccaacgaatgggcagttcctggccagaaattgggagtagcatattctcctcaatctcagtcatgtcttcgccgttgacgttggtattgccttgatagtgagcgttgtctggtgctgctcccggttttagttcccatgtcatggagtctttgctgagttgatagcgttcactccaggtaaaatcgatctcaccttcagcgggcaggtcattaacgacaggaaaattcgtggcaacagctttaaaatagctgctcagttttttacctgacttaacgatcaggtagtccagagtggcacaggtcgattcaaaatcgttgcttgcccacaggacgacgtcaggttcaccggatgattttttcgctttccgtaacaggaagagtggttttgtgctcattgttttttaacctcaactcagattaaaattcgttttgttcagtgaatgatcttgccggatacacactgttcatagcctgcgccatacgcaggctatttctttcagatttcaccttttaatttcattgcaattagagttgccagaaattcggcttttttttctgcgggcagattctttccgatatgcaccaggcacatttttttgacaccttcatcaagtgtttttacgttgcctgatggaccatcgatatcaaccacagtgaatggggtttctttattttctgttttaattacgtagccaatgcgctttccttccagattcacctcgtgaacaatgtcatcggtagttacaacagtggcttcataattggtaatcatgtttttctccttaattaaggttgagcgaatacctgccatttctggcataaattcagtttcgaatagtcaattaattaaagttcatgtgccatctggtctttttcggcacaagcttcactgcaatattttctcggttcgtcttttgataaaatcccgtgcatgaagtgaagcattctttcaatagctttgctttcttcaacgtcttttttgcaaaggtggtaagcacattttattttcttagtcatcaccatgactccgcctttacaggtaaaccatcacgaccgaggaagactttaatcatgcggtcagtaatgaatgtttttgtggtcaggttacgaatatatagttttcgctttttaatattgtttgccgaggcaatatatgtccggccttcatgaagaacataatcgccaggagtcacacactgacgtggtatttcatcagttccgaagtgatgtgcaatcataattatctccatttttacaaatgaactttgttgatgcggtgtctggtgcctccaggtgactgcaaccagttaacaattacagtcggctttcccacccaaaccaataaggactaacatgacttttaactgtgccacgtgcgcttagccgcattcaccgcatcacaaaattcactttaaaaagggcggacatcagccgaacttcaagaaaaaaactgatgccgccaggactacacacagcaatgtcgttatttacaaccggaggcgcactcccaccatttaaatttaacagacaagaccgactctttatggatatcggaaatgcgccttcgtgttgtgcccggttttatttcaccacctccgggcttcggtggtctcggctatacccctacagcgagagcttgtgttaacatttcaatacccttacagttgagagttattgatatgttggatgtatttactccattgttgaaactttttgctaacgagccactcgaaagacttatgtatacgattatcatttttggtctcactctctggctgataccgaaagagtttactgtcgcattcaatgcttatactgaaataccttggctctttcagattatcgtttttgccttttctttcgtggtcgccatttccttctcaagattgcgagcacatattcaaaagcattattcattactaccagagcaacgagtattgcttcgtttatctgagaaagaaatcgctgtatttaaagatttccttaaaacaggaaatcttattatcacttctccttgccgtaacccggttatgaaaaaattagaacggaagggcatcattcaacatcagagtgatagcgcaaactgttcttattatctcgtcaccgaaaaatactcccattttatgaagttattctggaacagcaggagtagacgttttaatcgttagcttactgtgtgcttctccaaccatcggcgcgcaccagtttcggttttaaatgttttgcttttggtatacgtcatggcagtgaacgttccatcctggttggggaacacgccgcacaccagggattcgttgttgccgaggtcgattttttgcattttgcgaatctcacatcttgttgctacgtatagcgacttctgcctgccagagatcccagtcgttgctgcgtaaagcctgcacagcctggttgtaagtgataccgcaacaatccatcaaatactgaactacttcgtaatgcaccatcttatctctccccttaacgccgggtggcggaactaactgctgcactgcaaaatttgaatcccgccgtcatgttcatacgcctcgggctggctacttaaccccttaccactgcctggtaactcgaagtattgcccggcgttctgtggggcggggtgggtggtatgctggaactataggtaatgcctaattgattgtcaataggctatgcctaatgttttgagcgtaacctaataggtgatggcgacagcagaaagtgatgggggggttaaataacggaatccaggagttttccgtcagaccatataagtttaagttccagtttttgtgatgttctggcttttccgttcagattcaagagctttcagatacttacccactttcatttccatcgctgctatgtaggcgcgaacatcgtggtcaacccaatctggttctgtagcatttccagataacaggaaagctacaatcgctcttatttcatcagaggctgcttgataaaggttgtttatatctaaaagttcactttttgtatctgaattggtgggggttggtatggggtattcgttaagcccccaatgctctggaccaacaacatcagaaaagaaacgccataattctggaagtttatctttacttatagagcctttcttaatccagtcataaattgatggtggttggactttaaagtggcgtgcgacctccgcctttgatttgacggatcccgatgcgatttttttgttaatggcctgctctatcgctcggcctaagtctttaccactaagcattgcttaatattctcctatgcgcattacattaggcaatccctacccttactgcattaggcacagcctattgacaattgcgttaggcgtcgcctaatatttctgtgtgtttttggagttcattcgatgaaaaaagagaactattcattcaagcaagcttgtgctgttgtcggtgggcaatcagcaatggctaggcttttaggtgtatcacctccaagcgtaaatcaatggatcaaaggggtacgtcaattgcctgccgagagatgtccagcaattgaacgtgcaacaagaggtgaggttctgtgcgaagaacttcgtcctgatattgactggtcatatttacgacgttcggcatgttgttcgcagaatatgtcagtgaagcaactaaatgacagtaacaaatcctcatttgatcatacctgaaacatcaagaggcaaatgattcatgaaaatcaagcatgagcacatcgaatcagtgttgtttgccctagcagccgaaaaagggcaggcatgggtagccaatgcaattactgaagaatatctgcgccaggggggcggcgaattgcccctggttccaggcaaggactggaacaatcagcagaatatctatcaccgttggttgaaaggtgaaacgaaaacgcaaagagaaaaaattcagaagctgatcccagcaattctggcaatccttccgcgcgagctgcgtcaccgactctgcatcttcgataccctggaacgccgtgcattactggcggcgcaggaagcgttaagtacggcaattgatgcgcatgatgatgcagtccaagccgtttaccggaaagcgcatttcagcggcggcggttcttccgacgattctgtcattgttcattaagcaaaagtttccatgctgtttgtgcttattctaagccaccgggcagcatcatacggggcaattatggccgcattaccatacatgcaactgtacatagctgattacctggctgacaccatgcatttgtcagcagaggagcatggtgcgtatttgttgctgatgttcaattactggcaaacaggaaagccaatacctaaaaacaggctggcaaaaattgcccgtctgactaacgagcgatgggctgatgttgaaccatccttgcaggagtttttttgcgataacggcgaggaatgggtgcatcttcggattgaggaagatctggcatcagtcagggaaaaattaaccaaaaaatcagccgcaggaaaagcatctgttcaggccagaagaagcagaaaggaagcagatgttcaaacaaaacaagagagaaatttaacaggtgttcaaacagatgttgaagtggtgtttgaacatgatgtcaacacaaaggcaactaataaagatacagataaagatctaaaaacagatccccccctaaatcccccccgggggaatcgaggtgtcaaaaagtttgaccctctggatattactttgccgaactggatttctgtctcgctttggcgtgagtgggttgaatttcgccaggcattgcgaaaaccgattcgaacggagcagggcgctaacggggcgatacgggagctggaaaaattccgccagcagggtttttcacctgagcaggtgattcgacacagcatcgccaatgaataccagggcttgttcgcgccgaaaggtgttcgacctgagacgttactccgacaggttaacaccgtctcgttaccggatagtgcgatcccgccaggcttcagggggtaactgaccatgaaaaatattgcgacaggcgatgttcttgaacgtatccgcagactggccccgtcacatgtaaccgcgccattcaagacggtagcggagtggcgcgagtggcaactttccgaaggccagaaacgttgtgaggagatcaaccgtcagaatcgtcagttgcgggtggaaaaaattctgaatcgctctggcatccagccattgcaccgcaaatgctcgttttcgaattaccaggtgcagaacgaagggcagcgatacgcgttgagtcaggcgaaatccatcgctgatgaactgatgaccgggtgtacaaattttgcgttcagcggaaaacctggtaccgggaagaaccacttagcggcagctatcgggaatcgcctgctgaaagacggtcagacagtgattgtggttaccgtggctgatgttatgagtgccctgcacgccagctatgacgatgggcagtcaggcgaaaaatttttgcgggaactgtgcgaagtggatctgctggttcttgatgaaattggcattcagcgcgagacgaaaaacgagcaggtggtactgcaccagattgttgatcgccggacagcgtcgatgcgcagcgtggggatgctgacaaacctgaactatgaggccatgaaaacattgctcggcgagcggattatggatcgcatgaccatgaacggcgggcgatgggtgaattttaactgggagagctggcgtccgaatgtcgtccagccaggaattgcgaagtaatttttaccgggagaaaaatttaatggagactgtttttgacgcactgaaagcaatgggaaaagccacatccatagaacttgctgcgcgacttgatatcagtcgtgaagaagtgctgaacgaactatgggaactgaaaaaggctggttttgttgataaaagcgcgtacacctggcgtgtggctgataacaatgttcagcaggaacagccagcgcaggcagaactgccggaagaaatcaccacagcaacagtagcgaaaatctcagagtgcgatttaaccgcgacgattgaacaacgaggaccacaaacggctgatgagctggctacattgtttggtaccacatcacgcaaagtggcttcaacgctggcaatggcaatcagcaaaggtcgtctgattcgcgtaaatcagggcggtaaatttcgttactgcataccgggcgataatttaccagcagagccgaaagcagcatcggtatctccgctctggttatctgcatcgtcgtctgcctgtcatggggtgttaatcattaccgtgataacgccatcgcctacaaagaacagcgcgacaaaaatgccagagaactgaagctggcgaacgcggcaattactgagatgcagatgcgtcagcgtgatgttgctgcgctcgatgcaaaatacacgaaggagttagctgatgcgaaagctgaaaatgatgctctgcgtgatgatgttgccgctggtcgtcgtcggttgcacatcaaagcagtctgtcagtcagtgcgtgaagccaccaccgcctccggcgtggataatgcagcctccccccgactggcagacaccgctgaacgggattatttcaccctccgggaacgactggtaatgatgcaggcccaacttgaaggtgctcagcaatacataaccgagcagtgtttaaagtaaaatcttaactacaatatgattcattttgatgattgtttcataaggaacagtgaagtaagatctaagaggagttaaattttatacagtataatcataatattgcagcaaggtggttataattgaaagaatatttagatatgaatacatctcatgtaagagttgttactcatatgtgtgggttcctggtttggctctatagtctttcaatgttgccaccaatggttgtagcattgttttataaagaaaaaagcctgtttgttttctttataactttcgttatatttttttgcattggtggcggagcgtggtatacaactaagaaatctggcattcaattacgtacccgtgatgggtttattataattgtaatgttttggattttgttttctgttattagtgcattccctttatggattgactcagaacttaatttaacgttcattgatgctctgtttgaaggggtttctggaataacaacaacaggagcaactgtaattgatgatgttagttcattacctcgggcatatttgtactatcggtcacagttaaattttataggtggtttaggagttattgttctggcggttgctgtattgccattattgggtattggtggtgcaaagctttatcagtcagaaatgccggggccatttaaggatgacaaactcactccccgcctggccgatacgtcacggacactgtggataacttattctttattaggtattgcttgtattgtctgttatagacttgcaggaatgcctttgtttgatgctatttgtcacgggatttccacagtttcgcttggtggtttctcaactcatagcgagagtatcggatattttaataactatttggttgagctggtggctggttctttttccctgctatcggctttcaacttcactctttggtatattgttattagcaggaaaacgataaaacctttaatcagagatattgaacttcgtttctttctgttaatagccttaggggtgatcattgttacctctttccaggtctggcatataggtatgtatgacttgcatggaagttttattcattcgttttttcttgccagctccatgctcactgataatggtttagctacgcaggattatgcaagttggcccacgcacacgatagtgtttttgctgttgtcaagtttctttgggggatgtataggttcaacttgtggtggaattaagtcacttcgatttcttatacttttcaaacaaagcaaacacgagataaatcagctttctcatcccagagcgttgttgagtgtaaatgtaggagggaagatagttacagatcgtgtaatgaggtctgtatggagtttcttttttctttatactctcttcacggtgttttttatactggtgttaaatggtatgggatatgattttcttacatcatttgcaacagtggctgcatgtattaataatatgggattaggttttggggctactgcatcgtcattcggagtgcttaatgacattgcaaaatgcttaatgtgcatagctatgattcttggtcgccttgaaatttatcctgttattatattgttttcaggttttttttggcgctcctaatatatggctgatttataattgtgagtttaatattatgttgactcactcattgatccaatacctaactttaccagcaacacctccgtccccagtagcactggctgctggggtgcgttttattcataaagcaaggctgtatgagcgagaaattaaagatagtctatcgcccattacaagaattgtcaccgtatgcgcacaacgccaggacgcacagtactgagcaggtggcacaactggtagaaagtattaagcaattcggctggactaatccggtgctgattgacgaaaagggcgaaattattgcgggtcacggtcgtgttatggcggctgaaatgctcaaaatggattctgttccggtcattgttctgtctggcctgacggatgagcagaagcagcgataacgatcagtatcgctcccgtaatgcattaatccgtcgccacattgagaaaatggatgccagtttgcacgtcggaacgaaggagtttgatatttcaaaggtttccgaggtggattctgttgatgatttactcattgataatgccgctcgttatctgctgaaagactggaaaggggttggtgaactggttaatggtgttgaggttgcactggaatatacggcagaacgagggatcgcgctgcttaagcagaatccagagttgtactggcagatccttgcagaagcagccagcatcgcccagggtaaagagcagcagaagcaggatacgataaaaaagccatagctgcccagcggtggttatcggagttcgggggagaaaggggggaaaaggcaagatggaagcgagaaaaactcaggttgccaccgataccggaaccagaaatagacccggtgcttaaggagttgttgtacgcctattcggtaatatcccgtgcccgacgttatgctggaatggctggggtgcctttgcctttatctctgacagagataaatgaatatttagccactcatccggtattgattgagcgcgatgaatttgaagcagtgatctttgcactggatgaccagtattttcaggagcagtgtgtgtagttgttaattacgtacactctgttacagagatgtgatggtgtctttaattaaatcgatgatgctcctggagaaaagcattgcgtggcctcgtaatcgctatatctactattatgtcgcctgaaacccacttcgcggtgggttttttgttgtcaggagttttaataaatggcagagcaaacctcgcgtctcgcaataattattgatagcactggagcgaaaaataatgctgacaatctgacctcctcattagtcaaaatgacgcaggctggggaaactgctgcaaatagcgcagggaaagtgactaaggcaacagaagatgagaagaacgcgctcgcaaaattaaaagcagctattgatccagttggtgccgcaattgatactgtcggtcgacgctattctgaattaaagaaatttttcgataaagggcttattgataaagaagaatatgaatttcttgtccgtaaacttaatgaaaccacagaggaattgagcggggttgcgcaagcgcagagagaagccgagaaggccggaaaacttgctgccgctcagcaggaagcgcaggctcaggcctttcaaagaatgctggacaagatcgaccctctggctgcggcgctaagaaatcttgaacaacagcatgatgaacttaatgctgcgtttgcatccgggaaaataaatggttctcagtttgagaattatagccgaaaaatacaggaaacacggcgagagcttaccggagaggctcaggcagagcgagaagcagcaaaagcgcatgatgaacaggttgttgctttgcaacgtctgattgctcaacttgatcctgtcggaactgcttttaatcgtctggtagaacaacagaaacagctcaatgaagcaaaagctaaggggatgctttctcctgaaatgtatgaggagctttctggaaaacttcgtgctatgcggagtgagcttgaggttactcaatcacaattaagcaaaaccggaatgtcggcaaaacaaacggcttttgctatgcgcatgttgcctgcacaaatgacggatattgttgttgggttgtccactggtcagtcgccatttatggtgttaatgcagcagggcggccattcagctatgcaggagacaagaatcgccagcttacccgttacagcgatacccgctggcatgaagattccgtgcgtaaccgctggttcagcgtgatggtggggccgtctgtgcgcgtgaatgaatggttcagcgcgtatgcgatggcgggtatggcttacagccgtgtgtcgactttctccggggattatctccgcgtaactgacaacaagggaaggtgcgaataagcaggtcatttcttcccaagctgactcgctgattaaaatttcgcggatctgggccgatttttttcccgcaaacacatcgaatcagcctatttaggctattttttccaccatttctggcgttatttccggtttttactgagatctctcccactgacgtatcatttggtccacccgaaacaggttggccagggtgaataacatcgccagttggttatcgtttttcagcagccccttgtatctggctttcacgaagccgaactgccgcttgatgatgcgaaacgggtgctccaccctggcacggatgctggctttcatgtattcgatgttgatggccgttttgttcttgcgcggattctgcttcaaggtttttaccttgccgggacgctcggcgatcagccagtccacatccacctcggccagctcctcgcgctgtggcgctccttggtagccggcatcggctgagacaaattgctcctctccatgaagcagattacccagctgattgaggtcatgctcgttggccgcggtggtgaccaggctgtgggtcaggccactcttggcatcgacaccaatgtgggccttcatgccaaagtgccactgattgcctttcttggtctgatgcatctccggatcgcgttgctgctctttgttcttggtagagctgggtgcctcaatgatggtggcatccaccaaagtgccttgggtcatcatgacgcctgcttcggccagccagcgattgatggtcttgaacaattgacgggccagttgatgctgctcgagcaggtggcggaaattcatgatggtggtgcgatccggcagggcgctatccagggataatcgggcaaacaggcgcatggaggcgatttcgtacagggcatcttccatggcaccgtcgctcaggttgtaccaatgctgcatgcagtgaatacgcagcatggtctccagcggatagggccgtcggccattgcccgccttgggataaaacggctcgatgacagcggtcatattctgccatggcagaatctgctccatgcgggagaggaaaatctcttttcgggtctgacggcgcttagtgctgaattcactatcggcgaaggtgagttgatggctcatgatgtccctctgggatgcgctccggatgaatatgatgatctcatatcaggaacttgttcgcaccttcccaaggggaaaacgcacgacgtgctgaccggaagtgatgacggtcgccacagcaacacgtctctggcgtggggagctggcgtgcagtttaacccgaccgaatccgtggccattgatattgcttatgaaggccccggcagtggcgactggcgcactgacggtttcatcgtgggtgtcggttataagttctgattagccaggtaacacagtgttatgacagcccgccggttcaggcgggcttttttgtggggtgaatatggcagtaaagatttcaggtgtactgaaagacggcacaggaaaaccggtacagaactgcacaatccagctgaaagcaaaacgtaacagcaccacggtggtggtgaacacgctggcctcagaaaatccggatgaagccgggcgttacagcatggacgttgagtacggtcagtacagcgttattctgttggtggaaggattcccgccgtcacatgccgggaccattaccgtgtatgaagattctcaacccggtacgctgaatgattttctcggtgccatgacggaggatgatgcccgtccggaggcactgcgccgttttgaactgatggtggaagaggtggcgcgtaacgcgtccgcggtggcacagaacacggcagccgcgaagaagtcagccagtgatgccagcacatcagcccgtgaggcggcaacccatgcggctgatgctgcggactcagcacgcgcagccagcacgtcagccggacaggccgcgtcgtcggctcagtcagcgtcttccagcgcaggaacggcatcaacaaaggccactgaagcatcaaaaagtgctgccgctgcagagtcctcaaaaagcgcggcggccaccagtgccggtgcggcgaaaacgtcagaaacgaatgcttcagcgtcactacaatcagcagccacatctgcatccaccgcgaccacgaaggcatcagaagctgcgacctcggcccgggatgcggcggcctcaaaagaagcggcaaaatcatcagaaacgaacgcatcatcaagcgccagtagtgcagcttcctcggcaacggcggcaggaaattccgcgaaggcggcaaaaacgtccgagacgaacgccaggtcttctgaaacggcagcgggacagagcgcctcggctgcggcaggctcaaaaacagcggctgcgtcgtctgccagtgcagcgtcaacaagtgccgggcaggcctcagccagtgccaccgccgccggaaaatcggcagaaagcgccgcatcgtctgcttcaacagccacaacgaaggctggcgaagccactgaacaggccagcgcagcagcgaggtctgcttccgcagcgaagacatccgaaacgaacgcgaaagcgtcggaaacaagcgcagaatcctcaaaaacggctgccgcatcgtcagccagttcggcggcgtcatcggcatcatcggcgtctgcttcaaaagatgaggcgaccagacaagcgtcagcagcgaagagcagcgccacgacggcatccacgaaggcgacagaggctgctggcagtgcgacggcggcagctcagagcaaaagtacggcggaatccgcggcaacgcgcgccgagacagcagctaaacgggcagaggatattgcatccgccgtggcgcttgaggatgcaagtacgacgaaaaaggggatagtacagctcagcagtgcgaccaacagtacgtctgaaacgctggcggcaacgccaaaggcagtaaaatcagcctatgacaatgcagagaaacgtctgcagaaagaccagaacggcgctgatatacccgataagggatgcttcctgaacaacattaacgcggtcagtaaaacagactttgctgataagcgtggtatgcgttatgtgcgggttaacgctcctgcaggtgcaacatctggaaaatattaccctgttgttgttatgcgttctgctggctcagtaagcgaactggcatcaagagtcattatcaccacggcaacgcgaaccgcaggcgatccgatgaataactgcgagtttaacggatttgttatgcctggtggctggactgacagggggcgttatgcttatggcatgttctggcaatatcaaaacaatgaacgagccattcactcaataatgatgagtaataagggcgatgatttgcgctctgtgttctatgttgatggcgctgctttccctgtttttgcgtttattgaagatggcctgtcaatatccgcacctggtgctgatctcgttgttaatgatacgacctataagtttggggcaacaaatccggcgactgaatgtatcgcggcggacgttatccttgattttaagagtgggcgtggtttttatgagtctcattcgttaatcgttaacgataacttgtcgtgcaaaaaactttttgccacagacgaaattgtagcgcgtggtggtaatcagattcgaatgataggtggggagtatggtgcattatggcgtaatgatggcgctaaaacttacctgctgcttaccaatcaaggtgatgtttatggtggctggaatacattaagaccgtttgctattgataacgcaaccggcgaactggttattggaaccaaactgtccgcaagtctgaacggtaatgcattaacagcaacaaagctgcaaacgccaagacgggtttctggtgttgagtttgatggttccaaagatattactttaaccgccgcgcatgtggctgcttttgccagaagggcaacggatacatatgccgatgcggatggtggcgttccatggaatgccgaatctggcgcttacaatgtcacccgctctggcgacagctatattctggttaacttctataccggagtcggaagttgccggaccctgcagatgaaggcgcattacagaaatggtggtctgttctaccgttcttcaagagacggttatggttttgaggaagactgggcagaagtttatacctcgaaaaatcttccaccagaaagctacccagtcggcgcaccaatcccgtggccatcagataccgttccgtctggttatgccctgatgcaggggcaggcttttgacaaatctgcttacccgaaacttgcagccgcttatccgtcaggcgtgatccctgatatgcgtggctggacgattaagggcaaacctgccagtggtcgggccgtattgtctcaggaacaggacggcattaaatcgcatacccacagcgccagcgcatccagtacagatttggggacgaaaaccacatcgtcgtttgattacggcactaaatccacgaataacaccggggcacatacacacagtgtgagcggctctacaaactcggctggagcacacacacactcactagccaacgtgaacacggctagtgctaactccggtgctggtagtgcatcaacaagattgtctgttgtgcataatcaaaactatgcaacatcatctgctggcgcacatacccactcactgtccggcactgctgcaagcgcaggtgcacacgcgcatactgtcggtattggtgctcatacgcactccgttgcgattggttcacatggacacaccatcaccgttaacgctgctggtaacgcggaaaacaccgtcaaaaacatcgcatttaactatattgtgaggcttgcataatggcattcagaatgagtgaacaaccacggaccataaaaatttataatctgctggccggaactaatgaatttattggtgaaggtgatgcatatattccgcctcatacaggtctgccagcaaacagtaccgatattgcaccgccagatattccggctggcttcgtggctgttttcaacagtgatgagtcatcgtggcatctcgttgaagatcatcggggtaaaacggtttatgacgtggcttccggcaacgcgttatttatttctgaactcggtccgttaccggaaaatgttacctggttatcgccggaaggggagtttcagaagtggaacggcacagcctgggtgaaggatacggaagcagaaaaactgttccggatccgggaggcggaagaaacaaaaaacaacctgatgcaggtagccagtgagcatattgcgccgcttcaggatgctgcagatctggaaattgcaacggaggaagaaatctcgttgctggaagcatggaaaaagtatcgggtattgctgaaccgtgttgatacgtcaactgcacaggatattgaatggccagcactgccgtagggtaaaacatataaattctataattagatgtatctttccatttacggcaaggaagggggcttggaagacgtaaagcatctcacaccgagattattttttatatgtcaggtgtctgaagttttgctttggctcttaaaatggtttgccgcgaggttttgaattcccgggcaatggcacttatacttacacctgacttaattcgttcgaataccacctgtttctgttcttcatttaacacaggaggtcgaccaaaacgtttccctgcgccgcgggctcttactatcccggaatgagtgcgttcaagtaaaaggtctcgttcaaattcagcgactgctgaaattacttgcatcatcatttttcctgttggactggtcaggtcaatgccacccaatgctaagcaatgcactctgatacctgtttcggtcagttgttccactgttttcctgatatccattgcattacaaccaaggcgatccagttttgtcacaatcaattgatcaccacatttcaggcgagcaagcaaccggttaaaaccaggacgctcactggttgctgctgagccgctaatgtgttcttcgattatttgctgaggtttgattttaaaacctgcactttcgatttcccggcgttgattttcggtggtctgatccagcgttgatatccgacagtaagcaaaaattcgagacatagtgagactctatacgaaattggtgttcatatcataatgcatctcagaaaataattatgattatttttgtgcatatttgtatgtacacgttcgaaaataaacgaatgcgtatgcaaccccgtaattttggtgagacccaaaatcgattttgtgaaaaatggctttaactcggtttgtttttcgagttccgggcggactcaaggaagaagaatagtgttgcgtgttattttaaccagatttcaagttgtttggtcgtggaaaagtggagcaaaatgttgttaaagtggaaaaatgataaaaaagtaagtttattatattacattttaccatttaaattttggttgtctttaagaactgatatcgctgtttgtaataattctttgttatccagccatgatgttttctttatgtttccttcaatgtaatcaagcaatgttctggtattgataggtcttccctgttttgctacttccactacagcatcccctaggataattcttacttcaggaagctgcgcagggaaccactttagggtgtcttttgatttcatgaagatattccttaaaatattattgattttcattgcgatattgtatgtctgattcaggatatgttgacttatacatcggttttgtctgggttattggatatgccaatccctaattttattagagcatgactaaaaatgctgaatatgataaggagcgaagtgattatcagtatgctgttcatatagcctcgaattagtaatgtgttatatatgatatagttgacaatttttatcctgggtgttcttaaagttcgtagataaacattgtcgtttcaggtatacaggaatgctaacaggtggcggcaaaaatcaggcggtttatggcgcaagctgaagtggcaactgcaaactatcttatgcagagactctacacggattgggtttaaaagtatacatagataacagtttttatctgaagaagaaaaatatcaaggtgatatagcctatatgcctttgatgcggaggaatgaatgtgatgggagtgatgtatctgaatagttgaaaaaccgcagtcacgtcgtatgcaagaacgtgctgcggttggtttgactttgattgagacgttttggaatttttttcggtggcaaaaatggggcaaaacgctgcaaaaggggcaaaaaaggggcaaaaaaagagtggattatcgtagcttattgttgtcgctgatgatatttaacacattgaaaaataagtaaaatacttatgagtcagagagttgtgatttttgcccttacttgttcaggttgtattgttctttcttactaatttcttgattttgcgacatttaaaagcgactcaattcgttatatggcatcagaagagtatgcgtcatgccggaacgcccagcataagaaatctgatataaaaaactgtggcgtgtatggtacggattagaggggaaaatgtcagcacatttgcgaaatgaatcaaaaagcccgcagcaatgtgcgggcgttagtgtcagcgcacaaccagcacggagcactctgcgtgacgcactacagctgcggcgttggaaccgagcagataagtggtgatatccggtcgatgggaagcaatgatgatcatatgagcggggatcttcttcgccaattccagaatgcggtctttgggcgagccttcctcaacatggacatgcactctgtcggttggcagtttaaattttttaatgatctcttccagttgcgatttggcttccgctttcaggtcatccattgccggtaattctgcggaatacgctaaacccagagaggcatagtagggcagtgaaggtattaccgtcaggaaatgaacctctgcatcatcaatctttgcctcttcctcaacgtggctaatcacgcgttgagttaattctgaatcggaaatatcgatagggacaagaatcgttctgttcataaaacctcctgttttagtatccgcataaagtgtaacgccagatgacactttttgtgtaatgacggagttcacatttttaatttagatcaaaggaggaagaataagcagaaaaagcccgccataacagcgggcaggaggatttagaactgataaaccagacctaaagcgacaatatcatcggtagagatgccattggcagcgtagaagctgtcatcttcatccaacaggttgattttatagtcaacgtaggtggacatgtttttattgaaatagtaagtcgcgccaatatcggcgtatttaaccagatctttatcatcaacacctgccgggttgtctgcaccacccgcagcgtgcaggtcacggcctttagacatcaggaaagagactgccggacgcagaccaaaatcaaactggtactgtgcagtgacttcaaaattctgggttttgtttgccacagcataatcgctgtcgccaaacggggtcatattacgcgtttctgaatacatggttgccaggtaaatattgttagcatcgtattttagcccagcagtccacgcgtctgctttatcaccacccgccgcagtatggttaacctggtcattggtgcggtcagaagaggtgtatgccgcaccagcgctaaagcccatgcctaaatcatatgttgtggaaagaccccagccgtcaccgttttcatggcgaacatcacgtccgttgttggtgccttcctgaccattactggctccttcgttgttaccttgatactgcaccgcgaagttcagaccatttaccagaccgaagaaatcagtattacgataagtcgcgacgccattggctcgaccagtcataaagttgtctgcattggtataagagtcaccgccaaattcaggcagcatatcggtccagccttcgatgtcgtacattacgccataattacgtccgtaatcgaaagaaccgtaatctgcaaatttcagcccggcaaatgccagacgggtccatgactggttttttgaagattcagtgttgtttgcctgaatattgtattcccattgaccgtagccagtgagttgatcgttaatttgggtttcgcctttaaaacccagacgcgcatagctctggtcgccatctttcgctgaattatcagaaaaataatgcaggccatcaactttgccatacagatctaatttgttgccgtctttattataaacttcggctgcatgtgcagcacctgcggcgagcagggcaggaattaaaagtgccagtactttgcttttcattgaataaatcctttagttattttatttgccttttatccccatttcggggagtgaaaacatcctaaaggagaagttcagttagccgataaatatcatttgttacgccttaagtaaaaccttaatcaaataattcctctgaaatgataataagtctggtgaatgtatcgaagataatacatacaaaataaaaattatacttttaatttgctatacgttattctgcgcgggttatatgcctttattgtcacagattttattttctgttgggccattgcattgccactgattttccaacatataaaaagacaagcccgaacagtcgtccgggctttttttttagaattggataatccttatccagagcatttaatcggtgttgcttttttccgcttttccggccatttgtgccaggaagtcatagcgtttttgcaaatcagctgcagcatctttccataactgttctgccacttctggctgctgcgaattcagccgacggaaacgttgctcgtgaagtaacgtttcttccggtgcttctgacggcgggcgtgaatccaaggccagcggcagtttgccttcatcggcacgacgcggatcaaagcgatatagcggccagaagccggtagctgtgagttggcgcatctggtcgtggctgagtgccagatcgtaaccatgctcttcacacgggctataagcaatgatcagcgatggccccggatacgcttccgcttcctgaatcgctttcaccgtctggttcagctgcgcgccgagagaaatctgcgccacataaacatgaccgtacatcatcatactgacgccaagatctttacgcgctttacgtttgccgtgctcgccaaatttagttactgcacccagcggtgtcgctttcgacgcctgaccaccggtgttggaatagcattgcgtatccagcaccagaatgttgacgttttccgtcaaactcaatacatgatccagaccgccaaagccgatatcgtaagcccagccatcaccaccaatcagccagattgatttttccaccagtgcatctgcatcacgtagcagttcatgtgcttcggcaacatcgttgagttgctggcgtaaagctgcaacctgttcacgacgaacctctggcgtggcgtctgatttcaacgccgtcagtaattccgccgggattttatcggcaaattgatccagcagacgcagcacgcggacacggtgttgatcgaccgtcaggcggaaaccaaggccaaattcggcattatcttcaaatagagagttcgcccatgccggcccacgaccgttggcatcggtggtatacggtgtagagggcaggttaccgccataaattgaagaacagccagtggcgttagcgatcaacatccggtcgccatagagctgagtcagtaatttaatatacggcgtctcgccacaaccggagcaagcacctgaatattcaaacagcggtgtaatcagctgcgatgtacgaatatcaatacgttccagtttgctacggtcgatttctggcaggttgaggaagaaatcgtaattgattttctcttcttcgacatgttccaggcgagacatcatattgatggctttaatctctggattctgacggtctttcgccgggcaaacttcgacgcacaggttacaaccggtgcaatcttccggtgccacctgcaagacatatttctgcccgcgcatatcacgcgatttcacatccagcgaatgcaggctggcaggggcgttttccatcgcttcaggcggcaccacttttgcgcgaatagctgagtgtgggcaagcggcaacgcagtggttacattgggtacagagttcctctttccagatggggatctcttcggcgatattgcgtttttcccagcgcgtagtgcccatcggccaggtgccgtctggcggcagcgccgaaacggggagggcgtcaccaagcccggcgagcatcgcagcggttacggttttcacgaaatcaggggcggcatcggaaaccactggcggtcgattggcgctgtgcggatttaccggttgcaacggaacttcttctacggattcacgcgccagcgccagagcctgccagttgcgttccaccagatcctggcctttgctactgtaacttttggcaatcgcaccctgcaattctgcgagggcgctatcgccaggcagaatttgcgtcagatggaaaaaagccatctgcatgacggtattaatacgggccgccaggccacattcgcgggcgattttcgccgcgttaatcacatagaagcgcgcttttttctggtttaacacggcctgaacttcttgcggcaagcgcgaccacacttcatctgcgctgtacggcgtgttgagcaggaaaatgccgccaggttttaaacgctcagccatctgatatttatcgataaactgcaactggtggcagccaacaaaatcagcctgggaaatgagataagcggaacgaatcggctgttcgctcactcgaaggtgagaaaccgtcaggccgcccgcctttttggagtcgtaaacaaaatagccctgtgcgtaccacggcgtggaattaccgataatcttgatattgtttttggtcgcggaaacgctgccatcactaccaaggccataaaacaaggcttccagtttcgccgagtttggcagggtgttttccggcaacggcagtgacagattggtcacatcatcgtaaataccaaccgtaaagcgcgctttcggtttagccgcgttgagctcggcaaataccgccagtacacagtctgggccaaattctttggatgaaagaccatagcgcccaccaatgacacggggcagagtttcgcgctcgccattattaaaggcttctgccagtgcggtcattacatccagatagagcggttctgcctgggcaccgggttctttggttctgtccagtaccgccacgctgcgtacggatcccggcagagcttgcagtaaatgtttagcggagaaggggcggtacaggcgaactttcagcacgccaactttttcgccacgggttagcaattcatcaaccacttcttcacaggtgccaatggcagagcccatcaggataatcacccgttccgcttgcggatgcccgtaatattcaaacggctgatactgacgacctgtcgcggcagagaaatcattcatcgcctgttcaacatggtcatagaccgcgttgtaccatgggttggtggcttcgcgagactggaaataagtgtcaggattggcggacgtaccgcggatcaccggatgttccgggttgagtgcccgggcgcgatgagcatcaatttcgacctgcggcatgagatcaagaatcgtgtcatcggccagcgggacaattttattgatttcgtgggacgtgcggaaaccatcaaagaaatgaataaatggcacgcggcttttcagcgtcgcgatttgcgaaatgagagcaaagtcttgcgcttcctggacgtttgctgcacacaacatcgcgcaacccgtctggcgcaccgccataacgtcggaatgatcgccaaaaatagagagtgcatgtgtggcaacggtacgtgccgctacatgcaggacaaacggtgttagttcgcctgccagtttgtacagcgtcgggatcatcagcagcaaaccctgcgatgacgtaaacgatgttgaaagggcacccgtctgcaaagcgccatgcacggtagcgatagcacccgcttccgactgcatttcaaccacgcgtggtgtgtctccccaaacgttctttaagccgtttccggcccaggcatcagcctgttctgccatcgtggaactgggggtaatagggtagatggcgataacttcactggtgcgaaatgcgaccgaagcaaccgcgccattaccgtcaatagtaatcatatgacacccttacattgcgcaaatgaggggcgcacgaaattgctgcgcgcccagtagtaatctttcaattttagcaaatggctttcttctgcattttcgcttttgtgtcccccacatcagcgtaatgaatgttttgatcaaacagagggcaaaaaaatagccataaaaaagtaaaaatgcggggcaacgcgcaggacagctctcgacgccgccctctgtgctgcctattatttatggcggtgtcgtttggcttgaagatcagaggaagaaaagatgcgagcagcgttttgggtagggtgtgccgctttattgttgtcggcgtgtagtagtgaacctgttcagcaggcgactgccgcgcacgtagcgccaggtttaaaagcgtcgatgtccagtagtggagaagcaaattgtgcaatgatcggcggttcgctttctgttgcccgtcaactggatggtacggcgattgggatgtgtgcattacccaacggcaaacgctgtagcgaacagtcacttgccgccgggagctgtggcagctattaattcattaaatccgccagcttataagttaatgtctgttttgcggtcgccagcgttaactggttcgcggtcagatccacttgtgcaccttctttcagcatttcgctaatggtgttatcgagttcattaagctgcgggttagcgcacatcatacgggtcattgccagccctttggctgtcagttcaccattagacagtttgccttcaccgctaaagcggttacacatgctgccggaaatcatcattttttcaccaaagctgatttctggcggatttttatcgctggtcacgggcttaccgtttacgctttccagcacaaagcgatgatgctgtagctgttctggcgtaacagcaattttgtcattacttacacatcccgccatcagcaggcttagcgcaacaaacgcggctactttcttcattgtggttctcaattacagtttctgactcaggactattttaagaatagaggatgaaaggtcattggggattatctgaatcagctcccctggaatgcaggggagcggcaagattaaaccagttcgttcgggcaggtttcgcctttttccagattgcttaagttttgcagcgtagtctgagaaatactggtcagagcttctgctgtcaggaatgcctggtgcccggtaaacagcacgttgtggcaggcagacaggcgacggaatacgtcatcctggatcacgtcgttggatttatcttcaaagaatagatcgcgttcgttctcatacacgtccatacccaacgaaccaattttctgatttttcagcgcttcaattgctgcctgagaatcaatcaatgcaccgcgactggtattgacgatcatcacgccatttttcatctgttcgaaggcggcttcgttcaacagatgatagttttccggtgtcagcgggcagtgcagagagataacgtctgattcagagaacagggttggcagatcgacatactccacaccgagttccagcgccgctgcacttggatacggatcgaacgccagcagacgcataccaaaacctttcagaatgcgcagcatcgccacaccgattttaccggtaccgataacgcctgccgttttgccatacatagtaaagccggtcagaccttccagagagaagttagcatcacgggtacgctgatacgcgcggtgaatacggcggttcagcgtcatcatcataccgatggcgtgttcagcaacggcctctggatcataggctggaacacggactactttcagccccagttcttttgccgcgtcaaggtcgacgttattgaaaccggcacagcgcagggcgatatatttaacgccgtgctttttcagctcttccagcaccgggcggctgccgtcatcgtttacgaaaatacataccgcttcgcagccattggcagttttagcggttttttccgtcagcagaaagtcaaaaaattccagctcaaagccaaaggactcgttcacctgttgcaggtacttcttgtcgtactgttttgtgctataaacggcgagtttcataagactttctccagtgatgttgaatcacatttaagctactaaaaatattttacaaaatttcaaatttaattgaaagctatggcgatattgaaaaattcatcaacaactatgcttagtgtaggcgcaaccttcaactgaacggttaaacatgccacaatacccgtattgaatgcttaatttttcgctaaatcaggatattaactacccatgctgggtaaatataaagccgttctcgcgctgttattactgattattcttgtgccgttgacgctgctgatgacgctcgggctgtgggttcccacgctggcgggcatctggctaccgctcgggacacgtattgcattagatgaaagcccacgcattacgcgtaaaggtttaatcattcccgatctccgttatctggtgggagattgtcagcttgcgcatatcaccaacgccagcctttcacatcccagccgctggttattgaacgtcggcacggtagaacttgattctgcttgtctggcgaaattgccgcagacggagcaatcgccagccgctccaaaaacactcgcgcagtggcaggccatgctgcctaacacctggatcaatatcgataaactgattttttctccctggcaggaatggcagggaaaactctctctcgcattaacctctgatatccagcaactgcgttatcagggcgaaaaagttaaatttcaaggccagctgaaagggcaacaacttacagtcagcgaactggatgtcgtcgcgtttgaaaatcagccgccggtaaaactggtgggggaatttgctatgccgctcgtgccggatggacttcctgtaagtgggcatgctactgcgacgttaaacttgccgcaggaaccgtcactggtggatgccgagctggactggcaggaaaatagcgggcaattgatcgtgctggcacgggataacggcgatccgttgctcgatttgccgtggcaaattactcgtcaacaattgaccgtaagcgatggtcgctggagctggccgtatgcaggttttcctttgagtggccgactgggtgtcaaagtcgacaactggcaggcagggcttgagaacgctctggtcagcggacgactgagtgtgctgacccaggggcaagcgggtaagggcaacgcggtgcttaattttggcccaggaaaattaagcatggataacagtcagctgcctctgcagctgaccggtgaagcgaaacaggcggacctcattttatatgcccgtttacctgcgcagctaagtggaagtctgtctgacccaacgctgacctttgagccaggcgcgttacttcgttcaaagggaagagtcatcgattcgctggacatcgatgaaatccgctggcctttagcgggtgtaaaagtcacccaacgtggtgttgacggacgtttgcaggccatcttgcaggcgcatgaaaatgaactgggcgatttcgtgctgcatatggatgggctggcgaatgattttctccctgacgctggccgctggcagtggcgctactggggaaaagggagttttacaccgatgaatgccacctgggatgtcgcaggaaaaggtgagtggcatgacagcacgattacgctgaccgatctctccaccggtttcgaccagttacaatacggtacgatgacggtagaaaagccgcgattaattctcgacaagcccatcgtctgggtacgtgacgcacagcatccctcctttagcggcgcgctgtcactggacgccgggcaaacgctgttcactggcggcagtgtgttaccgccatcaaccttaaaatttagcgtcgatgggcgcgatcctacctatttcctctttaaaggcgatttacatgctggtgagattggcccggttcgggtaaatggtcgctgggacggtattcgtctgcgcggtaacgcctggtggcctaaacaatcactgaccgtattccagccgctggtgccacccgactggaagatgaacttacgcgatggtgaactgtatgctcaggttgcattttctgctgcgcctgaacaaggattccgcgcgggaggacacggcgtgttgaaaggcggtagtgcctggatgccagataatcaggttaacggtgtcgattttgtcctgcctttccgttttgccgatggagcctggcatctggggactcgcggccccgttacgttgcgaattgccgaagtgattaatctggtgacagcgaaaaatattacggctgatttgcaagggcgttatccgtggactgaagaagaacccttgctgttgactgatgttagcgtcgatgtgttaggcggtaacgtactgatgaaacaattacgtatgccgcaacatgacccggcgctgttgcggctgaataatctctcatccagcgaactggttagcgccgtcaatccgaaacaattcgccatgtccggggcatttagtggtgcactgccgttatggctgaacaatgaaaaatggattgtgaaagatggctggctggcgaatagcgggccgatgacattgcgactggataaagacactgcggatgcggtggtaaaagacaatatgactgcgggttcagcaattaactggttgcgctatatggaaattagccgttcatcgacaaaaattaatttagataatctcggtttattaaccatgcaggccaacattacaggtaccagtcgcgttgatggtaaaagcggtacggtaaaccttaattaccatcatgaagagaatatttttacgctgtggcgcagtttacgctttggcgataatctccaggcatggctggagcagaacgcacgtctgccgggaaatgactgtccgcaaggaaaagagtgtgaggaaaaacaatgaaaattttactggctgcgttgacgtcatcttttatgctggttggctgtacgcctcgcattgaagtcgctgcacctaaggaaccgatcactatcaatatgaacgttaaaattgagcatgagatcatcatcaaggcagacaaagatgtcgaagagctgcttgaaactcgtagcgatcttttctgaggtgatgatgaagaaaacattacttctttgtgcgtttcttgttgggctggtaagcagcaatgtaatggcattgactctggatgaagccagaactcaggggcgggtaggtgaaacattttacggttatctggttgcgctgaaaacggatgctgaaacagagaaattagtagccgacattaatgccgaacgtaaagcgagttaccaacaactggcaaagcaaaataatgtgtcggtagatgatatcgcgaaactcgccgggcaaaagctcgtagctcgggccaaaccgggggaatatgtacaagggataaacggtaaatgggtgcgaaaattttaatagcaaaaccgcaatatcgggataacgctacaggagaaggcgattgatctattttcctgaaacaaggtgaatattcaaaaactcctgtcaaattgccttttgccctgaaaaatgcatagtcaaatatctgttttaactaattggcgttgcagtacatgcaacgccaattagttagcggaatttacgtcgatactcgcctggcgtcatcccaaagcgttgcttaaataccgttgaaaaatgactctggtcagaaaatccccaatgaaagccgatgcctgccagtttttcatcatctgcggcatggcgaatcgcatctgcacaaaaatcgagacgacggttacgaatatattgcgcgactaccaaacctttatcggcaaacattcggtacaaactacgtactgacatacctgtctctccggctatccactccgggcgtaatatctcttcgcgaatattatcgtctatcaacgtaaccactttttgaaactgacgttcacgacgaggttgaacagattcccgctgatgaagtaccgggcgcagcagacacaccatcgcctgtagcgcagcttcactttctgtttcagaaagtgccggattattcatgctctcctgtaacaggcgatgactgagttgcaccatgggtaagtcagcgtccagtctttctgcgcagataggtttttgatggggaaaatattgttccagcagagtgcgtggcaaaagtaatgaaatctgtttagaagactcctgccagtaaagcgaacaggggcgtgaggcatcgagtaacgtaatatcgccagcgccaatctgcacctgacgctcatcctgctccattattgcctgaccactaagctgaaaaacggtgtaaaaccaggcatcgtcgctgccttttacttcctgccaggtgcgggataaattcaccccgctggttgtcacggtactcagctttagtcctttggcaaaatgcgtgtccagtacacccgtgtaacgctcagtcagcaggcgtccggtaaaatttccgcatacctgattgatttgggaaagccattgctgaaactcattatccactgcggggttcatggcacgttttcgctctgtgaaatgtatttttattgttgcatttgtgttgcaataaacgaagctaatgagcctgactataggaaataagtcttgtcaggcatagagacataagcggttattgtcacgatttgcggagcttgtcacagctgacaaagcgaatgtcacagcgaaaaaagtgacttttcttgtcgctgcgtacactgaaatcacactgggtaaataataaggaaaagtgatgacagagccgcatgtagcagtattaagccaggtccaacagtttctcgatcgtcaacacggtctttatattgatggtcgtcctggccccgcacaaagtgaaaaacggttggcgatctttgatccggccaccgggcaagaaattgcgtctactgctgatgccaacgaagcggatgtagataacgcagtcatgtctgcctggcgggcctttgtctcgcgtcgctgggccgggcgattacccgcagagcgtgaacgtattctgctacgttttgctgatctggtggagcagcacagtgaggagctggcgcaactggaaaccctggagcaaggcaagtcaattgccatttcccgtgcttttgaagtgggctgtacgctgaactggatgcgttataccgccgggttaacgaccaaaatcgcgggtaaaacgctggacttgtcgattcccttaccccagggggcgcgttatcaggcctggacgcgtaaagagccggttggcgtagtggcgggaattgtgccatggaactttccgttgatgattggtatgtggaaggtgatgccagcactggcagcaggctgttcaatcgtgattaagccttcggaaaccacgccactgacgatgttgcgcgtggcggaactggccagcgaggctggtatccctgatggcgtttttaatgtcgtcaccgggtcaggtgctgtatgcggcgcggccctgacgtcacatcctcatgttgcgaaaatcagttttaccggttcaaccgcgacgggaaaaggtattgccagaactgctgctgatcacttaacgcgtgtaacgctggaactgggcggtaaaaacccggcaattgtattaaaagatgctgatccgcaatgggttattgaaggcttgatgaccggaagcttcctgaatcaagggcaagtatgcgccgccagttcgcgaatttatattgaagcgccgttgtttgacacgctggttagtggatttgagcaggcggtaaaatcgttgcaagtgggaccggggatgtcacctgttgcacagattaaccctttggtttctcgtgcgcactgcgacaaagtgtgttcattcctcgacgatgcgcaggcacagcaagcagagctgattcgcgggtcgaatggaccagccggagaggggtattatgttgcgccaacgctggtggtaaatcccgatgctaaattgcgcttaactcgtgaagaggtgtttggtccggtggtaaacctggtgcgagtagcggatggagaagaggcgttacaactggcaaacgacacggaatatggcttaactgccagtgtctggacgcaaaatctctcccaggctctggaatatagcgatcgcttacaggcagggacggtgtgggtaaacagccataccttaattgacgctaacttaccgtttggtgggatgaagcagtcaggaacgggccgtgattttggccccgactggctggacggttggtgtgaaactaagtcggtgtgtgtacggtattaatctggttcgctcataagtaaaaaacggcacctggtgccgtttttttgtctgaaacaatcacttatctttcttcagcgcccctagcgttggcgtttcgtcaaagaagttccatggtttcagcagagtatgtacccattcggtcggcataatcggccactcttcggcgcgggccacatgtgtggtgccggtggtcatccagacaacggcgtcggtgttgtccagcgactcgttatccttactgtattgtccaagaccggtgtcatgagtagaacggttcggatatttgccttccgggaaacgctcgccaggatgataacgcgttacccagagctgcttgtccataaagcttaaacgatgatagatccactcgtccggcgcgaactgggcaccttttgctaccgggtgagtaccacctgcataaggaataatttgataggaaaccggattgcccatgcggttctctttgttcgggttactcaacagacgaatcgtgcccggatcaaatttctgtgcggcatcctgttcattgccgatgttgtactgattaacttgcatggtactggtgcgtgggccaccggcagtattcggttttaccactgggtccatcgccaccaggctgttattctcgccatctacatccagatcgaggcggaaattataaatatgttggtgtgtagtacccacgatattgtgatcgataagcgtgccgtagcgcgtgtcatctttcgccgtctcatcgtgcatggttttcgctttaacacctttcaccgcttcgatgcccgtagcaccggcatcgatgccaatagtgccgttttcatggaagatccagtcaaaaatgtagtcatagttacccactgtactgatccagcgcaccactaactcccggcgttcggtactgacgttgggctggcccatttcctgatgcttatactccggcccggcataacgttcaaataccgcgatagcgcgagggatctccatcggcacgccagtgtagtcggcgatggtttcattaaggagcactgcgttagacggggcatctttaccacgagcaattggtgaggttagcgtgcccataccgtagtcaccagagtccagatacgctttaaagtaccagccaatatcaggatcaccgtaaggcacaatcatgccgccgagagaaccttcgtacatgactttgcgtttggtgccattgtcgttataagtcacggtggagatcatcggcccgacgcgagagttcatgctgaggtgaaaatcccagttccgccagtgaatcatatcgccagtaatggtgtaatttttaccttcaggctcaatgatttgcataggcttaactgccggagcaacgcggtcacggccatcaaatgggcgtgcggtcattggcaccggaactaccggaccttcttcaatcttaacgatttttttctgttctaaatcaacgaccgccaccaggttttcgatgggatgtgcccagtagttgccatcaccgacatcaagatagctgatgactttgagcaaccgggcatcttgtttcaggccatctttaccatcgaaataacctacggtcagcggcgtggtaatcacttttttcgcatcagtaataccgcgtttcttcacggcagcggcaaattcttcactgttgttaataatgttctgcacactggcgaaatcatccagcaacaccataccgtgggcgtctttaatgggttgccaggagagcagtttgttgttttgcagatccaccaccgcttcgatgatatgtttgccgtcgagcataatgacgtcggctttgcgcggctggtcaaccggtttgttttccagcgcaaacgcccagacagcttctttatctggcggtagcagggagatctcagtaaaacgggtattgggtttgaagtccgcggaagctttaacaatttcaacggcctgtttaatttcgtccgcagttagcgcattaagtgggtgagggcgcttttctacctgaaaggtttgatccagcccggactggaaaacatcgttaataaaggtgtcagaaacccaggctttattgtctttcatcactaccggtacttgcagtgccagaggctgaccattaacaattgctgtttgcgcaccaggcttcactttcacgtacgcgccatctttaatcagggtaaagagctgggcgtagtcgtcccactgcacatcggcaccaaattctttaagcgttttatccattggcaccatatgcgcttcaccaccgtgggcaaataccggcgcttgccaggcgaaacttaaggcgactgccaacgccagggttgttttacgggcagaatacagagaggggcttcccattattaacctcgtcagatgttgtgttcttgttagcaaccgcgctctgtgggcggtttagtcaggttcacattatcagtactgatgcaaaggggattgcctgcacctgccaggttgtttggcaggtgtgccagcttttcatacagtggatgccctgaaaatagatgtacacatcatgcataatgtgacaacgtcacaaaacttagtgaaataaaagggcaactattcgccgttgcccttcattcaccgattaatcgacaaaatcaccgtgctgcctggccaccagcgtcagaattgaatacagcgccaccggggtttgatgctgattgaatacctctacagcccattccaccacacctgttggtttttcttctgcgctacgctgttttttcagcgtcttgcgcttacaggtgagacgcacctggatggtatcgcctggctttacgggttcgataaaacgcaagctttccagcccgtagttagcaatgaccggaccgacaccggcatcgacaaacagacccgcagccgcagaaagcacaaaatacccatgcaccacccgctcaccgaaaatagattcggcagcagcaatcttatccatatgtgcatagaaatgatcgccgctgaggcaagcaaagttaacaatatcggcctctgtcattgtgcggcggggagtcaacaggctgtcgcctggttgtagctcctcaaaatatttgcggaacggatgaatacgatcttcttcgactttcgcaccgcgcacccactgtttactgatagcggcaagcatcgtcggactaccctgaacagcggttcgctgcatgtaatgtttcaccgctcgtaaaccgcctaattcttcaccgcctcctgcgcgaccaggcccaccatgtaccagttgtggcagtggggagccatgcccggtggattcttttgccgactcttcattgaggatctgaattcgcccatgcgtacgtgccgcgtcggcaataaactgacgcgcaatttgcggatcagccgtcaccagcgttcccgcaaggctaccgccgcctgcacaagccagttgcagagcatgtcgctggttttgtgctggcatcagcgttgcgacagggccaaaggcttctgttgcatgtaccgccggtgtttcatccggctgcggacagtacaataaggttggcgggaagaaggcacccgcagcagataaatccgcctgaccaccgaggcgaatctcgcatcctgcagccagcaatatgttcactttttcctgcacatcggcacgctgctcagcatttaccagtgcgcccattttcacgccttcctgagcaggatcaccgaccacgactttctgtaatcgcgcaaccagagcatcactgacagcattaaccaatgcctgcggcacaataatccgccggattgccgtacatttttgcccggcttttgtggtcatctcacgcacaacttcacgaataaacagcgcaaactccggttgatccggggtgacatcttcgcccagtacgcagcagttcagggaatcagcttccatagtgaaggggatagatttggcgacgatatttggctgaactcgcagcatctgtccggtcgccgctgaccccgtgaaagtcaccacatcctggctgtccagatgatccaacaagtcgccagcactaccgcagatcagactaattgcgccttcgggaacaagaccactatcgacaattgatttcaccatcgcctgagtcagttgggccgtcgcggtagctggtttgatgatggctggcattccgcccagccacgttggtgccagcttttccagcattccccagcaggggaagttaaaggcgttaatatgcactgccacgcctgactttgaggtcagtaaatggcgcgcggcaaatccaccttctttcgataaggggatcaattcatcttccggccacagcgtatcgtcaggcagctcccggctaccgaggctggcgtaagtaaataacgtcccaatgccaccttcaatatcaacccaactgtctgcccgcgttgcgcctgtttgcgcagaaagagcatagaaacgctctttttcactcagcagatgtttagcgaccgctttaagcatcgccgcacgttcgataaaggtcatagcgcgaagggcgggggcacctttttcaatggcaaactggcgggcagccgccatatcaagaccttcactggtcacttcccataacgcctcgccgctaatagcgtggtgaatcaaacggctacggccccggccagactgccaggtaccggataagaaactggctaactgctgcatcgctactctccagatgtttcacatttctgttgctaatagttaaatcgcgaatcataaaaagcaaaggatcttttaacgaaatgttaactatgcgatctgtatagcaactgcggaaaacattaatgcactgataaataatgatttataaaaatagggtgcgaaatccgtcacagttcaaacatacaaaatttgtgattttacttaactattgtgtaactttcataaaacaatgtgattcgtgtttttaattaattcacgaaaactggaatcgtaaaggtgatgacgtgacccaagaagaacgctttgagcaacggatagcccaggaaacggctatcgagccacaggactggatgcccgatgcttaccgaaagacattgatccgccagattgggcagcatgcgcactccgagattgttggtatgttgcctgaaggtaactggatcactcgcgcaccaaccttgcggcgtaaagccattctgttggccaaagtgcaggatgaagccggtcatggtctgtatctctatagcgccgccgaaacactgggctgcgccagagaagacatctaccaaaaaatgctcgacggacggatgaaatattcctccatctttaattatccgacattgagttgggctgatatcggtgttatcggctggctggtggatggcgcagcgatcgtcaatcaggtggcgttatgccgcacttcttatggcccgtatgccagagcaatggtgaaaatctgcaaagaagagagttttcaccagcgtcaggggtttgaagcctgcatggcactggcgcagggcagcgaagctcaaaagcagatgttgcaagacgccattaaccgtttctggtggccagccttaatgatgttcgggccaaacgatgataactcgccaaacagcgccagaagtctcacctggaaaatcaaacgtttcaccaacgacgaactccgccagcgtttcgtggataacaccgttccacaggttgaaatgctcggtatgaccgttcctgacccggatctgcattttgacactgaaagcggtcactaccgctttggtgagatcgactggcaggagtttaacgaagtaattaacggtcgcggaatttgtaatcaggagaggctcgacgccaaacgtaaagcctgggaagaaggtacctgggtacgggaagcagcgctggcccatgcacaaaaacaacatgcccgtaaggtcgcataaggagattcaaaatgagtaatgtttactggccgttatacgaagttttcgtgcgtggcaaacagggcttatcacaccgccatgttggcagtttacatgctgccgatgagcggatggcactggaaaatgcccgtgatgcttacacccgtcgtagcgaaggatgttcaatttgggtggtgaaggcgagtgaaattgttgcctcgcaaccggaagaacgcggtgaattttttgatccggctgaaagcaaggtctatcgccatccaacgttttacaccatccctgatggcattgagcacatgtgaggtcggaaatgaatcagttaacggcttacaccttgcgcctgggcgataactgcctggtgctctcccagcggttgggtgaatggtgcggtcacgcaccggaactggaaatcgatctcgcactggcaaacattggcctcgatttattaggtcaggcacgcaacttcttatcgtatgccgctgaattagcgggagaaggcgatgaagataccctggccttcacccgagacgagcgccagttcagcaacttattgttggttgaacaaccaaacggcaattttgccgacaccattgcacgccagtatttcatcgatgcatggcatgtggcgctctttacccgtctgatggaaagccgtgatccgcaactggcggcgatttctgccaaagcaattaaagaagcgcgctatcacctgcgttttagtcgtggctggctggagcgactgggcaatggtactgacgtatcagggcaaaagatgcagcaggccatcaacaagttgtggcgttttaccgccgaactgttcgatgccgacgagattgatattgcactgagtgaagagggtattgcggttgatccacgcactttacgcgcagcgtgggaagccgaagtttttgccgggatcaacgaagccacattgaacgtaccgcaagagcaggcgtatcgcactggcggtaaaaaaggactgcataccgaacaccttggacccatgctggcagaaatgcagtatctccagcgtgtcttgcccggtcagcaatggtaacagaggagatgggtatgcaacgtctggccaccattgcaccgccacaggttcatgagatatgggcgctactcagccagatcccggacccggagatcccggtgctgaccattactgatttaggcatggtgcgtaatgtgacacagatgggagaaggatgggtgatcggctttacgccgacatattccggttgtccggcaacggaacatttgattggcgcgatacgtgaggcaatgacaaccaacgggtttacccccgttcaggttgtgctgcaactcgacccggcatggaccaccgactggatgacccccgatgcccgtgagcgtctgcgagagtatggcattagcccgcccgccggacacagttgccatgcccatttgccgccagaagtacgttgcccgcgctgcgccagcgtccataccacacttatcagtgaatttggttccacggcctgcaaagcattgtaccgctgcgatagttgccgcgaacctttcgattatttcaaatgtatttgaggatgccatgacaacgtttcattccttaacagtggcaaaagtcgagtcggaaacccgtgatgcggtgaccattacctttgcggtgccccagcctttgcaggaggcgtatcgctttcgccccggtcaacatttgaccttaaaagccagctttgatggtgaagaattacgccgttgttactccatttgccgcagctatctgcctggcgaaattagtgtggcggtgaaagccattgaaggcggacgtttctcccgctatgcccgcgaacacatccgccagggtatgacgctggaggtcatggtgccgcaggggcatttcggctatcagccgcaggccgaacgccaggggcgctatctggcaattgcagcaggatcaggtattacgccaatgctggcgattatcgccaccactttacaaaccgagcctgaaagtcagttcaccctgatctacggtaaccgtaccagccagagcatgatgtttcgccaggcactggcagacctgaaagacaaatatcctcagcgtttacagttgttgtgcattttcagtcaggaaaccctcgacagcgatctgcttcacgggcgtattgacggtgaaaaattacagtcacttggggcctcgctcattaattttcgtctttatgatgaggcatttatttgtggtccggcggcgatgatggatgacgcggaaaccgccttaaaagcactgggaatgccagataaaaccattcatctggagcggtttaatacgcctggcacgcgcgtcaaacgtagcgttaacgtgcaaagtgacggacaaaaagtgactgtacgtcaggatgggcgggatcgggaaatcgtgcttaatgccgacgatgaaagcattctcgatgcggcattgcgccagggggcggatctgccctatgcctgcaaaggcggcgtctgtgcgacctgcaaatgcaaagtgctgcgtggcaaagtggcgatggaaaccaattacagtctggaaccggatgaactggccgcaggttatgtgttgagttgccaggcactgccgctgaccagcgatgtggtggttgactttgacgcgaaggggatggcatgagcgaactgatcgtcagccgtcagcaacgagtattgttgctgacccttaaccgtcccgccgcacgtaatgcgctaaataatgccctgctgatgcaactggtaaatgaactggaagctgcggctaccgataccagcatttcggtctgtgtgattaccggtaatgcacgcttttttgccgctggggccgatctcaacgaaatggcagaaaaagatctcgcggccaccttaaacgatacacgtccgcagctatgggcgcgattgcaggcctttaataaaccacttatcgcagccgtcaatggttacgcgcttggggcgggttgcgaactggcattgttgtgcgatgtggtggttgccggagagaacgcgcgttttgggttgccggaaatcactctcggcatcatgcctggcgcaggcggaacgcaacgtttaatccgtagtgtcggtaaatcgttagccagcaaaatggtgctgagcggagaaagtatcaccgctcagcaagcacagcaggccgggctggttagcgacgtcttccccagcgatttaaccctcgaatacgccttacagctggcatcgaaaatggcacgtcactcgccgctggccttacaagcggcaaagcaagcgctgcgccagtcgcaggaagtggctttgcaagccggacttgcccaggagcgacagttattcaccttgctggcggcaacagaagatcgtcatgaaggcatctccgctttcttacaaaaacgcacgcccgactttaaaggacgctaatgatggaattcatcctcagtcatgtagaaaagggcgtgatgacactaacgctcaaccgcccggaacgcctgaacagttttaatgatgagatgcacgcacaactggcagagtgcctgaaacaggtcgagcgcgacgacactatccgttgcctgttacttacaggtgccgggcgcggattttgtgctggtcaggatcttaacgatcgtaacgttgatcccacaggccccgcaccggatttagggatgtcagttgaacgtttctataacccactggtacgtcgcctggcaaaactgccaaaaccggtgatctgtgcagtcaatggcgtggcggcaggggcaggcgcaacactggcactggggggcgacatcgttattgctgcccgttcagcaaaattcgtcatggcgtttagtaagttaggcttaatacccgattgcggtggaacctggttactgccacgcgttgccggacgagcgcgcgccatggggctggcactgctggggaatcaactgagtgctgaacaggcgcacgaatgggggatgatctggcaggttgttgatgatgaaacgctggcagataccgcgcaacagctggcacggcatctggcgacacaaccgacatttggtcttggacttatcaagcaagcgataaatagcgctgaaaccaatacgctcgatacgcaactggatctggaacgtgactatcagcgacttgccggacggagcgcagattatcgtgaaggtgtcagtgcgttcctggctaaacgctcaccgcagttcacggggaaatagcatgatgataaatgtgcaaactgtggcagtgattgggagcggcaccatgggggcaggcattgctgaagttgctgccagtcatggacaccaggttttactgtatgacatttctgctgaagcgctgacccgcgcaatcgacgggatacacgcgcggctaaattcacgcgtgacgcggggaaaactgactgctgaaacctgtgaacgcacattgaaacgcctgatcccggtgaccgatattcacgcgctggcagctgcggacctggtcattgaagcggcgtctgaacgtctggaagtcaaaaaagcgctctttgcacagctggcggaagtttgcccgccacaaacgctattgaccactaacacttcgtcaatctctataaccgcgattgctgcggagataaaaaatcctgaacgtgttgcggggctgcatttttttaacccggcaccggtgatgaagttggtggaggtggtcagtgggctggcaacggcggcggaagttgttgagcagttgtgtgaactaacgttgagttggggtaagcagcctgtgcgctgtcattcgactcctggatttatcgttaaccgtgttgcgcgtccttattattccgaggcctggcgggcactggaagagcaggttgctgcaccagaagtgattgacgctgcacttcgcgatggcgctggtttcccgatggggccgctggaattaaccgatctgattggtcaggacgtcaattttgctgtcacctgttcggtgtttaacgctttctggcaggagcgtcgttttttaccttcgctggtgcaacaggaactggtgattggtggacggttgggcaagaaaagtgggctgggcgtgtacgactggcgcgcggaacgtgaggcagttgttggcctggaagcggtaagcgacagttttagcccaatgaaagtagaaaagaaaagtgacggtgtcacggaaattgacgatgttttattgattgagacacaaggcgagacggcacaggcgctggcaatacgactggcacgcccggtggtagtgatcgataaaatggcgggcaaggtggtgaccattgctgctgcagcggtgaacccggactcagcgacccgcaaggccatttattacctgcaacagcagggcaaaacagtgctgcaaattgcagattacccaggaatgctgatttggcgaacggtagcaatgatcatcaatgaagcccttgatgcgcttcaaaaaggcgtggcctctgaacaggatatcgataccgccatgcgtcttggggtgaattatccatatggcccacttgcctggggagcgcaacttggctggcagcgaatattaaggctccttgaaaatctacagcatcactatggcgaagaacgctatcgcccatgttcattgctgcgccaacgggcgcttctggagagcggttatgagtcataaggcctggcaaaatgcccatgcaatgtatgagaacgatgcctgcgccaaagcgcttggcatcgacattatctcaatggatgaaggctttgctgtagtgaccatgaccgtcactgcacaaatgcttaacggtcatcaaagttgccacggcgggcagctattttcactggctgatactgcctttgcctacgcctgcaatagccaggggctggcagccgtcgcttctgcctgcacgattgattttttgcgtccaggctttgccggagacaccttaactgctactgcgcaggtacgtcatcagggcaagcaaaccggtgtttacgacatcgaaattgttaaccaacaacaaaaaacggttgcgctgtttcgcggtaaatctcaccgcatcggcggcaccattacaggagaagcctgatgcgtgaagcctttatttgtgacggaattcgtacgccaattggtcgctacggcggggcattatcaagtgttcgggctgatgatctggctgctatccctttgcgggaactgctggtgcgaaacccgcgtctcgatgcggagtgtatcgatgatgtgatcctcggctgtgctaatcaggcgggagaagataaccgtaacgtagcccggatggcgactttactggcggggctgccgcagagtgtttccggcacaaccattaaccgcttgtgtggttccgggctggacgcactggggtttgccgcacgggcgattaaagcgggcgatggcgatttgctgatcgccggtggcgtggagtcaatgtcacgggcaccgtttgttatgggcaaggcagccagtgcattttctcgtcaggctgagatgttcgataccactattggctggcgatttgtgaacccgctcatggctcagcaatttggaactgacagcatgccggaaacggcagagaatgtagctgaactgttaaaaatctcacgagaagatcaagatagttttgcgctacgcagtcagcaacgtacggcaaaagcgcaatcctcaggcattctggctgaggagattgttccggttgtgttgaaaaacaagaaaggtgttgtaacagaaatacaacatgatgagcatctgcgcccggaaacgacgctggaacagttacgtgggttaaaagcaccatttcgtgccaatggggtgattaccgcaggcaatgcttccggggtgaatgacggagccgctgcgttgattattgccagtgaacagatggcagcagcgcaaggactgacaccgcgggcgcgtatcgtagccatggcaaccgccggggtggaaccgcgcctgatggggcttggtccggtgcctgcaactcgccgggtgctggaacgcgcagggctgagtattcacgatatggacgtgattgaactgaacgaagcgttcgcggcccaggcgttgggtgtactacgcgaattggggctgcctgatgatgccccacatgttaaccccaacggaggcgctatcgccttaggccatccgttgggaatgagtggtgcccgcctggcactggctgccagccatgagctgcatcggcgtaacggtcgttacgcattgtgcaccatgtgcatcggtgtcggtcagggcatcgccatgattctggagcgtgtttgagcatatcaacctgcgagtaccctacaatgataaccaatacaaagcttgacccgattgaaaccgcgtctgttgatgagttacaggcgttgcaaacacagcgtctgaaatggacgctcaaacacgcgtatgaaaatgtgccgatgtatcggcgcaaattcgacgcagcaggcgtacatcctgatgatttcagggaactttcagacctgcgtaaatttccctgtaccaccaaacaggatctgcgcgacaactatccctttgacacctttgccgtgccaatggaacaagtggtgcgcattcatgcttcttcgggaaccacaggtaaaccgacagttgtcggctatacgcaaaacgatattgataactgggccaatattgtagcgcgttctttgcgtgcggcagggggctcgcccaaagacaaaattcatgttgcctatggttacggcctgtttactggtgggctgggtgcgcactatggtgccgaacgtctgggcgctacggtgatcccgatgtctggcgggcagacggaaaaacaagcgcaactgatccgtgattttcaaccagatatgatcatggttacgccatcttattgccttaacctgattgaagagctggagcggcagttgggcggtgatgccagcggttgctcgctgcgggttggagtatttggtgctgagccgtggacacaggccatgcgtaaagagattgagcgtcgcctggggatcaccgcactggatatttatggcctgtcagaagtgatggggccgggggtggcgatggagtgtctggaaactaccgacggcccaaccatttgggaagatcatttctatcctgaaattgttaatcctcatgacggcacaccgcttgccgatggtgaacatggcgaactgttattcaccacgctgaccaaagaagcattgccggtcattcgttaccgcacgcgtgatttaacccgactgttaccaggaacggcgcggactatgcgccgcatggatcgcatcagcggacgcagcgatgacatgttgattattcgcggtgtaaatgtctttccgtcacaactggaagaagagattgtcaaattcgaacatttatcgccgcattaccaactggaggtgaaccgccgggggcatcttgattcactttctgtgaaagtggagttgaaagaaagtagcctgacattgacgcatgagcagcgttgccaggtatgccaccagctgcgccatcggattaagtcgatggtggggatctctaccgatgtgatgatcgttaactgtggcagtatcccgcgttcagaaggcaaggcgtgtcgggtgtttgatctgcgcaatattgttggtgcctgacgtatcgtctggccctggtggggtaaagcgccagggccagaagtcgatacgacctgtgctatgattcataaatcacaacaataacaacagactgaagcgaatgagtaaacttgatacttttatccaacatgctgtaaacgctgttccggtcagtggcacatctttgatctcctctctgtatggtgattcgctttcccatcgtggtggtgaaatctggttgggtagtctggctgctttgctggaagggctgggatttggtgagcgtttcgtgcgcaccgctttgtttcgtcttaataaagaaggctggctggatgtttcccgcatcgggcgacgcagtttctatagcctcagtgataaaggcttgcgcctgacgcgacgggcagaaagtaaaatttatcgcgcagagcaacctgcatgggatggtaaatggctcctgttgctctcggaaggtttagataaatcaacgctggctgatgtcaaaaagcagttgatctggcaaggttttggcgcactggcacccagcctgatggcatcgccgtcgcaaaaactggccgatgtacagacacttttgcatgaagcgggtgtggcggataacgtgatttgttttgaagcgcaaataccactggcgctttctcgcgcagcactgcgtgccagagtagaagagtgctggcatttaactgaacaaaatgccatgtacgaaacctttattcagtcattccgcccgctggtgccgcttttaaaagaggcggcagacgagttaaccccggagcgggcatttcatattcagcttttactgatccatttttatcgccgtgtcgtccttaaagacccattgttgccggaggagttgcttccggcacactgggcagggcatacggcgcgtcagctgtgtatcaacatttatcagcgcgtagcgcctgctgctttagcgttcgttagtgaaaaaggtgaaacctcggtcggtgaactgcctgcgccgggaagcctgtattttcaacgttttggcggcttgaatattgaacaggaggcgttatgccaatttatcagatagacggtctgactccggttgtgccagaagagagttttgtccatccgacagcggtattgatcggcgatgttattctcggcaagggcgtttacgttgggccaaatgccagcctgcgtggcgattttggtcgtatcgtggtgaaagatggcgcgaacattcaggataattgcgttatgcacggttttcccgagcaggatactgttgtaggagaagatggacatattggtcatagcgctatccttcacggctgcattatccgccgcaatgcattagtgggaatgaacgcggtagtgatggacggtgcggtgattggcgagaacagcattgttggtgcatccgcatttgtgaaagccaaagcagaaatgccagctaattacctgattgtcggcagcccggcgaaagcgattcgtgaactcagtgagcaggagttggcatggaaaaagcagggtacgcatgagtaccaggtgctggtgacacgctgtaagcagacgttacatcaagtcgagccattgcgggaaattgaacctggcaggaaacgcctggtatttgatgagaatctgcgaccgaaacagtaacagatgtaaaattattttgtccctttaattataaagcagagttatgtttaagctctgctttatttatttgagtattaattcataccgttttttcatcatataattatttataatgagaatgtggttttaatttgtaatttatattatatacacaatttatatatttcatggtctttttttattcacctgaattataattgtgaattataggaaagtatgtttgattagataataatctactggcaatattggatgtcttctatgttttaaataactaattggtcgggttagtgcatccggctttctttatattcgccagaaggatttattatgcaaaggaaaactctattgtcggcctgtattgcattagctctgagtggtcagggttgggcggcagatatcacagaggtagaaaccaccacaggtgaaaagaaaaataccaatgtgacttgtccggcagacccaggaaaactcagtccggaagagcttaaacgcttaccctctgaatgctctcctttagtcgaacaaaacctgatgccatggctttccacaggcgctgctgcgttaatcacggccttagccgtagtggaactaaacgacgatgatgatcatcatcatcgcaacaattctccactcccaccgacaccccctgatgatgaatcagacgacactccagttcccccaactcctggcggagatgagataataccggacgatccggatgatacgcctacacctcccaaaccggtttcgtttaataatgacgttattctcgataaaacagaaaaaacgttaactattcgcgattcagtttttacttataccgagaatgctgacgggactatatctctgcaagatagcaatggtcgtaaggcaacgattaatctttggcagattgatgaagcgaataacactgttgcccttgaaggggtgagcgcagatggcgcaacgaagtggcaatataatcacaacggtgagcttgttattacgggtgataatgccacagtaaacaacaatggcaaaaccaccgttgacggtaaagattccaccggtacggaaatcaacggtaataacgggaaagtgattcaggacggcgatctggatgtcagcggcggcggtcacggtattgatatcaccggtgacagcgcgacggtggataacaagggcaccatgaccgtcaccgatccggagtccatgggtatccagatcgacggtgacaaggccatcgtcaataacgaaggcgagagcaccatcaccaacggtggcaccggcacccagattaatggtgatgacgccacggcaaacaacaacggcaaaaccaccgttgacggcaaggattccaccggtacggaaatcaacggtaataacggaaaagttattcaggacggcgatctggatgtcagcggcggcggtcacggtattgatatcaccggcgacagcgcaacggtggataacaagggcaccatgaccgtcaccgatccggagtccatcggtatccaggttgacggcgaccaggcggttgttaacaacgaaggcgagagcgccatcaccaacggtggcaccggcacgcagattaacggtgatgacgccacggcaaacaacaacggcaaaaccaccgttgacggcaaggattccaccggtacggaaattgctggcaataacgggaaggtgattcaggacggcgatctggatgtcagcggcggcggtcacggtattgatatcaccggcgacagcgcaacggtggataacaagggcaccatgaccgtcaccgatccggagtccatcggtatccaggttgacggcgaccaggcggttgttaacaacgaaggcgagagcactatcaccaatggcggcaccggcactcagatcaacggtaacgacgccaccgcgaataacagtggaaaaaccactgttgatggaaaagattccacgggtaccaaaatcgcgggcaatatcggcattgtaaatctggatggtagcctgactgttacaggcggtgcgcatggtgttgagaacattggtgacaacggcacggttaacaacaaaggagatattgttgtttccgatactggatcgattggcgtgctcatcaacggtgagggggcaacagtatccaatacgggtgatgttaacgttagcaatgaagcgacagggttcagcatcacaaccaacagtgggaaggtttcgctggcaggcagtatgcaggttggcgatttctcgaccggggtagatcttaatggcaacaataacagcgtgacgctggcggcaaaagatctaaaagtggtcgggcagaaagcgacgggcataaacgtttctggcgatgcgaatacagtgaatatcactggtaacgttctggttgataaggataaaaccgcagacaatgcggcggaatatttcttcgatccatccgtgggtatcaacgtttacggcagtgataataacgtgacgctggatggaaagttaactgttgtatcagacagtgaggttacttctcgtcagagtaatttatttgatggcagcgcagagaaaacgtcaggtctggttgtgattggcgatggcaataccgttaatatgaatggtggacttgaactgattggagagaaaaacgcgcttgcagatgggtcgcaggttacttccttgcgcacaggatatagttataccagcgttattgtcgttagtggtgagtcgtcggtatatctgaatggagatacgacaatcagcggagaattccctctggggtttgccggggttattcgggtacaggataaagctttgctggaaattggcagtggcgctacgctaacaatgcaggatattgacagttttgaacatcatgggacaagaaccctggatttgcccctatatttccagacatctgttatcacttaacccattacaagcccgctgccgcagatattcccgtggcgagcgataacccagcgcactatgcggatgccattcgttataatgctcgaacgcctctgcaaggttctttgctgccgttaacccgtctggtttgggcatgatactgatgtagtcacgctttatcgttttcacgaagctctctgctattccgttactctccggactccgcaccgccgtgttcttcggttcaagtcccaacatccgggcgaactggcgtgtttcattagcccggtagcatgaaccattatccgtcagccactccactggagacgacggaagatcgttgccgaagcggcgttccaccgctcccagcatgacgtcctgtactgtttcactgttgaagccgccggtagtgaccgcccagtgcagtgcctcacgatcacagcagtccagcgcgaacgtgacacgcagtctctctccgttatcacagcagaactcgaacccgtcagagcaccatcgctgattgctttctttcacggccactctgcctgtatgtgcccgtttcgatggcggtacagcaggttttcgctcaagcaacagcgcattctggcgcatgatccggtaaacacgtttggcattgatcgcaggcataccatcaagttctgcctgtctgcgaagcagcgcccatacccgacgataaccatacgttggcagctctccgataacatggtgtatacggagaagcacatccgtatcatcagtgtgacgactgcggcggccatccatccagtcatcggttcgtctgagaatgacgtgcaactgcgcacgcgacacccggagacaacggctgactaagcttactccccatccccgggcaataagggcgcgtgcgctatccacttttttgcccgtccatattcaacggcttctttgaggagttcattttccatcgttttcttgccgagcaggcgctggagttctttaatctgcttcatggcggcagcaagttcagaggcaggaacaacctgttctccggcggcgacagcagtaagacttccttcctggtattgcttacgccagagaaataactggctggctgctacaccatgttgccgggcaacgagggagaccgtcatccccggttcaaagctctgctgaacaattgcgatcttttcctgtgtggtacgccgtctgcgtttctccggccctaagacatcaatcatctgttctccaatgactagtctaaaaactagtattaagactatcacttatttaagtgatattggttgtctggagattcagggggccagtctaaaccccagaacttacttatgctgattccggtgcgaaaattgttaataaaggtacttgtagattcaattggtcaacgcaacagttatgtgaaaacatggggttgcggaggttttttgaatgagacgaacatttacagcagaggaaaaagcctctgtttttgaactatggaagaacggaacaggcttcagtgaaatagcgaatatcctgggttcaaaacccggaacgatcttcactatgttaagggatactggcggcataaaaccccatgagcgtaagcgggctgtagctcacctgacactgtctgagcgcgaggagatacgagctggtttgtcagccaaaatgagcattcgtgcgatagctactgcgctgaatcgcagtccttcgacgatctcacgtgaagttcagcgtaatcggggcagacgctattacaaagctgttgatgctaataaccgagccaacagaatggcgaaaaggccaaaaccgtgcttactggatcaaaatttaccattgcgaaagcttgttctggaaaagctggagatgaaatggtctccagagcaaatatcaggatggttaaggcgaacaaaaccacgtcaaaaaacgctgcgaatatcacctgagacaatttataaaacgctgtactttcgtagccgtgaagcgctacaccacctgaatatacagcatctgcgacggtcgcatagccttcgccatggcaggcgtcatacccgcaaaggcgaaagaggtacgattaacatagtgaacggaacaccaattcacgaacgttcccgaaatatcgataacagacgctctctagggcattgggagggcgatttagtctcaggtacaaaaaactctcatatagccacacttgtagaccgaaaatcacgttatacgatcatccttagactcaggggcaaagattctgtctcagtaaatcaggctcttaccgacaaattcctgagtttaccgtcagaactcagaaaatcactgacatgggacagaggaatggaactggccagacatctagaatttactgtcagcaccggcgttaaagtttacttctgcgatcctcagagtccttggcagcggggaacaaatgagaacacaaatgggctaattcggcagtactttcctaaaaagacatgtcttgcccaatatactcaacatgaactagatctggttgctgctcagctaaacaacagaccgagaaagacactgaagttcaaaacaccgaaagagataattgaaaggggtgttgcattgacagattgaatctacactgttgaaattcagaatttaggttttgcttttgttactggtgaaaatacaacaggtataaatagtggcacgatctcgttattacaaaatggtaaagatccggcaccgtctcccattgttttactggctactaacggagggagcgccactaatgcaggtacgatcacaggtaaagtgacggaacaacatagcgtatttaacaagtattcaacgggcacatcgaattcatttatttttaataacgatgtcagtagcataacagggttagtcgctcaatcgaatagcacaattatcaatactgacagcggcatcattgatttgtatggtcgtggtagtgtcggcatgcttgctatagcagattcaacagcagaaaatcagggtaaaattacactggattctatgtgggtagatgcaaatgacactaccgcaatgcgagatatagctagcaacagcgccattgacttcggtacaggtgtgggagttggtactgatagttatagtggtgcagggaaaaatgcaacagcaattaaccaattgggcggtgttataactatttataacgccggcgcaggtatggcggcctatggcgccagcaatacagttattaaccaggggacgattaacctcgaaaaaaatggtaattatgacgatagtctggcagcaaatactctggtagggatggctgtttatgagcatggtactgctatcaacgaccagacgggtgttatcaatatcaatgttggtactggtcaggcgttttataacgatggcacaggaacaattgttaactatggtacaatctgcactttcggcgtgtgccaatcggggaatgagtacaataatacagatgatttcacctcactgatctataccggtggcgatacgattacacgaagcggagaaactgtaacgctaaataaatctgctgctgtgactgataagctggctgggaatgttgttaatagcggaacgctttccggtgatcaaattacggtatcaagcggtcttctggaaaataccagcggtggcatcatcaataacttagtaaaacttgacaagggtgccgtcattaaaaatgccggggtgatgacgaataacgtcgatgttagcggtggaatcctcaataatgccggagaaatgactgcgcaaattaccatgaatgctggtgctgatagttcgttagtgaacaacaccggaaccatcaataaaatcgtgcagaacgcgggggtattcaataatagtggcagtgtaacagggcggatgatgtcggctggcggggtctttaataatcaaactgacggggcgattatgagaggtgctgcgctgacaggtactgcagtggcaaataacgaaggaacctggaacctcggaagtagtagtgagggtaacaacaccgggatgctggaagttaataataattcagctttcaataaccgcggcgagtttattcttgataacgacaagaatgctgtgcacatcaaccagtccggtacgctttataataccggtcacatgaacatcagtaattcttcccacaacggagccgttaatatgtggggcggaaatggtcgttttatcaatgacggaacgattgatgtttctgcgaagtcactggtagtcagcgctaataatgccggcgatcagaatgccttcttctggaaccaggataacggggtcatcaacttcgatcacgacagcgccagtgccgtgaaagtcacccacagcaactttattgcccagaatgacggcatcatgaacatcagcggcaccggtgctgtggctatggaaggtgataagaacgcgcagctggttaacaatggcaccatcaacctcggtaccgcaggcactactgacacgggtatgatcggtatgcaactcgatgccaacgccacggcggatgcggtaatcgaaaacaacggcaccatcaatatcttcgccaatgactcgtttgcatttagcgtactgggtacagtaggtcatgtggttaacaacggcacggtggtgattgccgatggggttacgggttctggactgatcaagcagggcgacagcatcaatgttgaaggtatgaacggtaacaacggtaatagcagcgaagtgcattatggcgactatacgttgccggatgtgccgaagcccaatacggttagtgtaacgtcgggaagtgatgaggctggtggcagcatgaacaacctcaacggctatgtcgtcggtaccaacgttaacggcagcgccgggaagctgaaggttaacaatgccagcatgaacggcgtggagattaacacgggctttaccgctggtacggcagacaccactgtgagttttgataacgtagtggaaggtagcaacctgaccgacgctgacgccatcacctcaacgtccgtggtatggactgccaaaggcagcaccgatgccagcggtaacgttgacgtcaccatgagcaaaaatgcctacaccgatgtggcaacagatgcctcggtgaatgacatcgcgaaagcactggatgcgggttacaccaacaacgaactgtttaccagcctgaacgtcggcacgactgctgaactgaacagtgctctgaaacaggtcagcggtagccaggcgaccacggtattccgcgaagcgcgcgtgttaagcaaccgctttagtatgctggcagatgccgcgccgaaagtgggtaacggtctggcgttcaacgttgtcgcgaaaggcgatccgcgtgccgagttaggtaataataccgaatacgacatgctggcattgcgtaaaactatcgacctgagcgaaagccagacgatgagtctggagtacggtatcgctcgtctcgatggtgatggtgcgcagaaagcgggtgataatggcgttacaggcggttatagccagttttttggcctgaaacatcagatgtcgttcgataacggcatgaactggaataacgccttgcgttacgacgttcacaaccttgacagcagccgctcgattgcatttggcaacacgaacaaaacggctgataccgacgtgaaacagcagtacctggagttccgcagcgaaggggcgaagactttcgaaccgagcgaaggactgaaggttacgccatatgcgggtgtaaaactgcgtcacacactggaaggtggctatcaggagcgcaatgccggagactttaacctgaatatgaacagtggcagcgaaacggcggtggacagcatcgtcgggctgaaactggactacgcaggtaaagacggctggagcgctagcgctacgctggaaggcgggccgaacctgagctacgcgaagagccagcgtacggcaagcctggcaggcgcaggcagtcagcactttaacgtcgatgacggtcagaagggcggcggcatcaatagcctgacaagcgtcggcgtgaagtacagcagcaaagaaagttcgctgaatctggatgcgtacaactggaaagaggatggcatcagcgataaaggcgtgatgctgaacttcaagaaaacgttctaatttttagcatgtgatccctaaaccgcaacgctgatacaggttgcggtttttttattgccggatgtggtacgtgacgcgttttgttttgtgtctttcaggacaatagagcaactcatccagtaatcttgtttacaccttcgcattatttatctcttttcgtttctatactgatttttcttaatccgttttattacagggcagggtgcgatgagcagcaatacatttactctcggtacaaaatccgttaaccgtcttggttatggcgcgatgcaactggcaggtcctggagtttttggccccccacgagatcgccacgtcgctataaccgtgctgcgtgaggcgctggcattgggcgtcaatcatattgataccagcgacttttatggtccgcacgtcaccaatcagattatccgcgaagcgctttatccttactctgacgacctgacaattgtcactaaaattggtgcgcggcgtggagaggacgcatcctggttgcccgcattttctccggcagagctgcaaaaagcggtgcacgataatctacgtaatctcgggctggacgtgctggatgtggttaacctgcgcgttatgatgggggatggtcatggcccagcggaaggatcgattgaggccagcctgaccgtgctggcagagatgcaacaacaaggcctggtaaaacatattggcctgagcaacgtcacaccgacgcaggttgcagaggcgcgcaagattgccgaaattgtctgtgtgcaaaacgaatacaacatcgcgcaccgtgctgatgatgcaatgattgatgctttggcccacgatggcattgcctacgtgccgttcttcccgctcgggggctttacaccgctgcaatcgtccacactttccgatgttgctgcgagcctgggtgcaacaccaatgcaggtggcgctggcgtggctgttacagcgttcaccgaatattttgctgatcccagggacgtcttcggttgcgcatttacgggagaatatggctgctgaaaaattgcatctttctgaggaagtgttgtctacgttggatggtatttcgcgagaataacgaatatacaaaagggaaagatgcatttccctttttttcttttttaatggcatggagtgcatatgttgaaggccaggaattgcggctggatacgtttactgcccctgtttatgctgagtctaccagtacaggcggaacttcgatgtgttgcaaatgcagttgatattgaatcatttttttctgcggctaccgctgaagataaacaacaagttgaacaagctatcaacagtagcgtgaatcttgtccccttcggtttatctgcatcgaactggaaagtgcatcgtggcgatttagtggtagaaggtaatatagagagtaatcaaaaattgattgttcttgggaatttgacagtcaaaggtaatatttccactttctctctttctaatccatgggttattctcggtaacgtgacggcaacgaatatagttgcggattcaccactgttaattaccggttcgataaatgcaagtggactggtatttatcgactcatattacgataatccgtctacgattaaggggagtattaatgcgcgtgggatatttatcaatgacataattgcacctgttgttgcgtcttcgacaaatagtgaattcatggtccgtgcgagtgacaaacatgacactgaaaatgtcaaaaaagcgctgatgataataaatcctgatgcatattattgggggctaattaatgatgaagatgctctgaaagaaatttttaagcgaagcaatattcgcatggcagggaatgtctgtaatcagatgaaaaaagaagcgctgtttcgccctaagccttctcctgagttagtgcaagaattgcaaatgctggatgaaggcaaagttgctgcatttgaaggacgagacattgcgacatttgatcttgccgtaatgcgaactctcccaaggcttaaaggaatttcagctaacctacgcaaacaacttattaatagcaatgatgaacaaacgattgaaagtatggcgagatatatgcctgacaatgagattctggagttgaccgatcagcaattgggttaccagcctgttgttctggggttgctcgaccgtgaaccgctctctgtcgaaataatgacgcgaatgagtcgtctacctgatggtgtcggtccgttgaatcttgcgctacgtgaaaatctccctctggatatcgtcatgactctggcgaaaagagattgggatatgatcattcaggagctttataaagatgcgtggttattgcctgaatccattattgatggctatatccgcagtgatgattcctctattcgtcaggtcggtgctggaggacaactcacctacaatcaggcaatgcagttggcgaacgattcatcaaacaatgttgtcacaagcttagcgttcaagctggcagagatgaaacaccatggtcaattgttgcggatgacgccacaagagagtgacaaagttgcaggctatttataccaaaaattcgagaatgacgatgatctaatacgtgtgttatttttagcattgccagataacttacagtttaattttgttaaaaggatggagaaaaaatccccggcctacttttgctgtcgggatatgcaggtaattcactctgacgctgctttacaacggttattgacacgtttcaacgatcctgaagggtggagtaatctggcgaaaaatcagtatctgagcacgtcgatgaaacaaaaaatttggcaacgtgctttatcgcatcggaaaaataatccgaaagcagattcagatgcatatgaaaccagcgctgatatgattttgtctgagctgattagccacggcgaagttgatgaccagatgctattaaatgccaccgccctgatacgttcggacgactgggactttttagagagtgcattaattagttgggataatttacccgctgttgttctcaaggaattacagcaaaacacgccacgcaatgatatttgggcgaagttttttctgaggcaggaaaacagttcccgtgcgcaggttgacgaagcgttacgtgtttattatgcactagaccccgatgcgttagcacaactggatgtactggcaaaacaaccggatcgtatatggtggagtacactggcgaaaagcaatctcacatttttcaagttcggcgcacttaacaaccgccacacaccgcctgcagtactggcggcagaaattgatcccgagtggtggattgtggcgatgaataatccccgttttccagttgatgtattaaaggcgaggctgaaacgtgatcctttgctggcgttagagcttgttaaccctgaactggatttagtccgccagctggcgcttaacggtaagacgcgcgcaatacgggaacaagcgatgagaaaacttgatgagttgtattgatccacaacgtaatgttttttaactatctgattaattggggataatcattcctgacagtgagtccccaataccttgatatattctgaatttttaatgaaacggcgtgttgcgatatctccgtcaggggaattgatgcaccatagcgcaaaccgaattatcaaggattgataatgacgctctaccagataaaaccgctctttcagtcgctgttaaggccgacgatgttttggctttataagcaccacgttacagcgaatcacatcactcttgctgcactggcgctttctcttcttaccggattgctgttgatgttggcggcacaacccatcctctttttgctattgcccatcgtgctttttatccgtatggcgctcaatgcgctggatggcatgttggcgcgtgagtgcaaccagcaaacacgtctgggggcgattttgaatgagactggcgatgttatttccgatattgcgctctatttaccatttttatttttaccggaaagtaacgcatcactcgtgatactcatgttattttgcaccatattgaccgagttttgcggtttactcgcgcagacgattaacggtgttcgcagttatgccggtccatttggcaaaagcgatcgcgcgttaatatttggtctgtggggtctggccgttgccatttatccacagtggatgcagtggaataatcttttatggagcattgcttcaattctgcttctctggactgcgattaatcgttgtcggagtgtgcttcttatgagcgctgaaatataatgctggaaaaatctctggcaacacttttcgcgttgttaattttagcaacgctgataaaccgttttctgctatggcggttaccggagagaaaagggggtgaggttacattacgtattcgtacctggtggggcatcgtcatttgtttttcaatggtgatttcaggtccacgctggatgacgttgacgttttttgcgctgataagttttctggcattgaaagaatattgtacgcttatatctgtacattttccgcgttggttatattggggtattcctcttaactatttgcttatcggttttaattgctttgagctgtttctgttatttatacctttggctgggtttctgatattagccaccgggcaagttttagtgggtgacccctctggttttctgcataccgtgagcgccattttttggggctggataatgaccgttttcgccttgagtcatgccgcctggttattaatgttgccaaccacaaatatccagggcggggcgttactggtgttatttcttttggcattaaccgagtcaaacgatattgcacagtatttatggggaaaatcctgcggcagaagaaaagtggtccctaaagtcagcccgggaaaaacattggaaggtctgatgggcggcgtcatcaccatcatgattgcgtcactgattatcggaccgttactgacaccgctaaatacattacaggcattattagcgggtttgttaattggtattagtggtttttgcggcgatgtcgtgatgtcagccatcaaacgagatattggtgttaaagatagcggaaaactattgccaggacatggcggactccttgacaggattgactcattaattttcaccgctccggtatttttttattttatacgctactgctgttactgaaggaaaatagagaaaatggaaaattcacgcatccctggggaacatttttttaccaccagtgataatacagcgttgttttatcggcactggcccgctttacagcccggggcgaaaaaggtcatcgtcttatttcatcgcgggcatgaacattctggtcgtctacaacatctcgttgatgaactggcgatgccagatactgctttttatgcctgggatgcccgagggcatggaaaaagttcggggccgcgtggttatagcccatctcttgcgcgttcagtgcgggatgtcgatgaatttgtccgttttgctgccagcgacagccaggttggactggaagaggtggtagtgatcgcgcaaagcgtcggcgcagtgctggttgccacatggattcatgattatgcacctgcaattcgcgggctggtgctggcttctccggcctttaaggttaaattgtatgtgccgctggcacgtcctgcgctggcgttatggcatcgtctgcgtggtctgttttttattaattcctatgtgaaaggacgctatttgacccacgatcggcaacggggggcgagtttcaataatgatccgctgatcacacgggcgattgccgttaatatcttgctcgatctctacaaaacgtctgaacgtattattagagatgcggcggcgattacgctccccacgcaacttctgatatcaggcgatgactatgtggtgcatcgccaaccgcagattgatttttatcagagattacgtagccctctgaaagagctgcatctgctgccaggcttttatcacgacacgttgggtgaagagaacagggcgctggcatttgaaaaaatgcaaagctttattagtcgtttatatgctaacaaatcgcaaaaatttgattatcagcatgaagactgcacaggaccatcagcggatcgatggcggctactttctggtggacccgtgccattatcgccggttgatttagcgtatcgctttatgcgaaaggcgatgaaattgttcgggacgcactcttcgggcctgcatctcggaatgagcaccggctttgattcaggcagttcgctggattatgtctatcaaaatcaaccgcaaggtagtaacgcattcgggcgtttagtcgacaaaatctacctgaacagtgttggctggcgcggtattcgccagcgcaaaacccatttacaaatactgattaaacaagccgttgccgatctccacgccaaaggtttagccgtccgcgtggttgacattgccgcagggcatgggcgctatgtactggatgcgctggcaaacgagcctgccgtaagcgatattttgttacgtgattacagcgagttaaatgttgcacaggggcaagagatgattgctcaacggggaatgtctgggcgggtgcgttttgaacagggcgatgcgtttaacccggaggaactcagcgcgttaactccgcggcctacgctggcgattgtctctggcctgtatgagctttttcccgaaaatgagcaggtaaaaaactcactcgcaggtcttgccaatgccatcgaaccgggcggcattctcatctacaccgggcagccgtggcaccctcaactggagatgattgccggggtgttaaccagtcataaagatggtaaaccgtgggtaatgcgcgtgcgttcgcaaggggagatggattcactcgtgcgtgatgccggatttgataaatgcacacaacggattgatgagtggggtatttttacggtttcgatggcggtgcgtcgtgataactgaacgtcggaacgtattgctacaaggcgctggctggttattgttgctggccccgtttttcttcttcacctatggatctcttaatcagttcaccgcggttcaggaccttaacagccatgatatccccagtcaggtattcggttgggaaacggcgatcccttttcttccctggactattgttccttactggagtctggatcttttatatggattttcgctgttcgtttgtagcacgacattcgaacagcgccgacttgtccaccggcttattctggcaacggtaatggcctgctgcggttttttgctctatccgctgaagtttagttttatccgtcctgaagtgagtggggtgacgggatggctattttcgcaacttgaactgtttgatctgccttataaccagtctccttcgctgcatattattctctgctggctactttggcgtcactttcgtcagcatctggctgagaggtggcgtaaagtctgcggcggatggtttttactcatcgccatttcgacgctgacgacctggcagcatcattttattgatgtcatcacagggctggcggtaggtatgttgattgactggatggtgcccgtcgaccgtcgttggaattatcagaaacctgatcaacgtcgaatcaaaatagcactgccctatgtcgtaggcgcgggctcgtgcattgtattgatggagctaatgatgatgattcagttatggtggtcagtctggttatgttggccagtattatcgctactcataattggccgtgggtacggtgggcttggcgcgataacaacagggaaagatagtcaggggaaactaccgcccgccgtttactggctgacattgccctgccgcatcgggatgtggctgtctatgcgttggttttgtcgtcgcctggagccggtgagcaaaatgactgctggtgtttatttaggggcgtttccacgacatattccggcacagaatgcggttctggacgtcacctttgaattccctcgcggacgagccacaaaagatcgactctatttttgtgtaccgatgctggatctggtggttccggaagagggggagctccgacaggccgtggcgatgctggaaacattacgcgaagagcaaggcagcgttctggtccattgtgcattgggattatcgcgcagtgcgctggtggtggcggcatggttgttatgttacggacactgtaaaaccgttaatgaagcgattagctatattcgagccagacgcccgcagattgtgctgacagacgagcacaaagcgatgctgagattatgggaaaacaggtaagtggattgagatgtggactgaatatctacagtccacatcaagaccgtgtccggttatgcagaaacaatgctgtcgatggctgcttttgcgtcagactgtgctttcgctgccatttccggaccgtatgcgatcccttcggcgaagacaaatttcacatcggtaatgccgataaagccgaggaacgtggacagatacggcgtcaccaggtccgttggtccatctttgtggatcccgccgcggctggtaataacgatggcttttttacccgttaccagaccttccggaccgttctcggtatagcggaaagtaacgcctgcgcgggcaaccaggtcaaaatagtttttcaactgagtcgagatgttgaagttatacatcggtgccgcaataacgataacgtcgtgggctttcagctcggcaatcaactcatcggaaagtgccagagcttcctgctgacgcggagtcagcggcgcatcgctcggacgcagagcgccaaccagttcgccatccagtaccggaatcggatttgcagccaggtcgcgaacggtgatttcatcagcggagtgcttttcgcgccattgttcaacaaaataatcggacaactgattagactgagagtaccctgccaggatgctggatttaagaactaataccttgctcatggtgtttccttatagatgtttgaatgggcgatgccccgttgcttgttgacactttattcacaatcctgccacagagatagcgcaataaatcgaagcctatgttcgaatttattgaacaacgcatagaaagccgcgatgtggtactctatatctatcatttaaaagaaaattaatcaggcagactactgcccactaacgttatgacagaacaacaaaaattgacctttacggccttgcagcagcggctggattcgctgatgctgcgtgacagactgcgtttttctcgccgtctgcacggcgtgaagaaggttaaaaatcctgatgcacaacaggccattttccaggagatggcgaaagagattgaccaggcggcagggaaagtcctgctgcgtgaagcggcacgaccggaaattacttatcctgacaatttaccggttagtcagaaaaaacaggacattctcgaagcgattcgtgatcaccaggtggtgatcgtcgccggggaaacgggttctggtaaaacgactcagttaccgaaaatctgtatggagctggggcgcgggattaaaggactgatcggccatacccagccgcgtcgtctggcggcaagaacagtggcgaaccgtattgcggaagagctgaaaacggagccgggcggttgcatcggttacaaagtgcgtttcagcgatcacgtaagtgataacacgatggtcaagctgatgaccgacggtatcctgctggcggagatccagcaagaccgcctgctgatgcagtacgacactatcattattgacgaagcgcacgaacgcagcctgaatatcgattttttgctcggctatttgaaagagttgctgccgcggcgtcctgacctaaaaatcattatcacttccgcgactatcgacccggaacgcttttcgcgccactttaataatgcgccgattattgaagtctccggtcggacctatccggtggaagtgcgctatcgcccgattgttgaagaagccgatgacaccgagcgcgatcagttgcaggcgatttttgacgccgtagacgaactgagtcaggaaagccatggcgacattctgatctttatgagcggcgagcgggaaatccgcgataccgccgatgcgctgaacaagctgaacttacgccataccgaaatcttgccgctttatgcgcggctttcgaacagcgaacaaaatagggtattccagtcgcacagcggacggcgcattgtgctggcgaccaacgtcgcggaaacgtcgctgaccgtaccggggattaaatacgttatcgaccccggtacagcgcgtatcagccgctacagctatcgcaccaaagtgcagcgtttgccgattgagccgatttcccaggcgtctgccaatcagcgtaaaggccgctgtggtcgtgtgtccgaagggatctgtattcgtctctattccgaagacgatttcctctcgcgcccggagtttaccgatccggagattctgcgtaccaacctggcctcggttattttgcagatgaccgcgctggggctgggcgatatcgctgcgttcccgtttgtcgaagcaccggataaacgcaatatccaggatggcgtgcgtctgctcgaagagctgggcgcgatcaccactgatgaacaggccagcgcctataaactgacgccgctcggtcgccagctctcgcagttgcctgtcgacccacgtctggcgcgtatggtgctggaagcgcaaaaacatggctgcgtgcgtgaggcgatgattatcacgtccgcgctctccattcaggatccgcgcgaacgtccgatggacaaacagcaggcatcggacgaaaaacatcgtcgcttccacgacaaagagtctgactttctcgcgtttgtgaatctgtggaattatcttggcgagcagcaaaaggcgctttcttccaacgccttccgtcgcctgtgtcgtaccgattatctcaactatctgcgcgtgcgcgaatggcaggatatctacacccagttgcgtcaggtggtgaaagaacttggcattccggttaacagcgaaccggcggagtatcgcgaaattcacattgcgttgctgaccggtttactttcccatatcggcatgaaagatgccgataaacaagaatataccggcgcacgtaacgcgcgtttctccatcttccccggttctggtttattcaaaaaaccgcctaaatgggtaatggtggcggaactggtagaaaccagccgcctgtgggggcgcattgctgcgcgtatcgacccggaatgggtggagccagttgctcagcatttgattaaacgcacctacagcgaaccgcactgggaacgggcgcagggcgcggtgatggcaacggaaaaagtcactgtttatggtttgccgattgttgccgcgcgcaaggtcaactacagccagatcgatccggcgttatgtcgtgaactctttattcgccacgcgctggtggaaggtgactggcagacgcgtcacgcattcttccgtgaaaacctgaaactacgggcggaagtagaagagctggaacacaaatcacgtcgccgcgatattctggttgatgacgaaacgttgtttgagttctacgaccagcgcatcagccacgatgtaatctccgctcgccacttcgacagctggtggaaaaaagtcagccgcgaaacgcctgatttgctcaactttgaaaaaagcatgttgatcaaagagggcgcagaaaaaatcagcaagctggattacccgaacttctggcatcagggcaatctcaagctgcgtttgagctatcagtttgagcccggcgcggatgctgacggtgtgaccgtacatattccgctgccgttacttaaccaggttgaggaaagcgggtttgaatggcagatccccggtctgcgccgcgaactggtgattgctctgattaaatcgttgccgaaaccggtacgccgtaattttgtacccgcgccaaactatgccgaagcgtttttaggccgcgtcaaaccgctggagttaccgttgctcgacagccttgagcgcgagttacggcggatgaccggcgttaccgttgaccgcgaagactggcactgggatcaggtgcccgatcacctgaaaattaccttccgcgtggtggatgacaaaaacaagaagctaaaagaagggcgctcgctacaagatctgaaagatgcgctgaaaggcaaagtgcaggaaacgctatctgcggtggcggatgacggtatcgagcagagcggcttacatatctggagttttggtcagctgccggaaagctacgaacagaagcgtggcaactacaaagtgaaggcgtggccggcgctggtggatgagcgcgacagtgtggcgatcaaactgtttgataacccgctggagcaaaagcaggcaatgtggaacggtcttcgccgtctactgctgctgaatattccatcgccaatcaaatatttacatgaaaagttaccgaacaaagccaagctgggactgtactttaacccgtatggcaaagtgctggagctgatcgacgactgtatctcctgcggtgtggataaattgatcgacgccaatggtggcccggtctggacggaagaaggctttgctgcgctgcatgaaaaagtgcgtgccgaactgaacgacacggtggtggatattgcgaagcaggtcgagcaaatccttacggcagtgttcaatatcaacaaacgtctgaaagggcgggtggatatgaccatggcgctggggctttctgacattaaagcgcagatgggcgggttggtatatcgcggttttgtcactggtaacggcttcaaacggctgggcgacacgctgcgatatttgcaggcgattgaaaaacggctggaaaaactggcggttgatccacatcgcgaccgtgcgcagatgctgaaagtcgaaaacgtccagcaggcgtggcagcaatggatcaacaaactgccgcccgcacgtcgtgaggatgaagacgtgaaagagatccgttggatgatagaagagttgcgcgttagttacttcgctcaacaacttggtacgccttatccgatttcagataagcgtattttgcaggcgatggagcagattagcggttaaccctgctatttgcctgataaagaaaaaacccggtaagcatttagcgccgggttttttattaattctaaaacggtaagggtaaaaattcaggaattcagaaaaatacaattctctgctgcaagatgaataatgtttatctacagcatttccttaaaagatatgtcaggcttgcggagtggcggttaaggacatacgatttcctcctttcagagtgctccgcttctcactattatctcacgcagtattcttaagggaacgataaggaggaaccatgaacattaccccgtttccgacgctttcgccggcaactatagatgccataaatgttatcggacagtggctggcgcaggatgatttctccggtgaggtgccgtatcaggccgattgcgtgatccttgcaggcaatgcggttatgccgactatcgatgcggcatgtaagattgcccgcgatcagcaaattcctttactgattagtggtggtatcggtcactcgacaacttttttgtatagcgccatcgcacagcatccgcactacaacactatccgcaccactggcagagcagaagcgaccatcctggcggatatcgctcatcagttctggcacattccgcatgaaaaaatctggattgaagaccagtcaacaaactgcggtgaaaacgcacgctttagcatcgcgctattgaatcaggccgtagaacgagttcatacggctatcgttgttcaggaccccaccatgcagcggcgcacgatggcgacgttccgccgtatgactggggacaatcccgatgcaccacgctggttaagttatcccggattcgttcctcagttaggaaataacgcagacagtgtaatctttattaatcagttacaaggattatggccagttgagcgttatctctcactactcactggcgagctgccgcgtttacgcgatgatagcgatggctacggtccccgcgggcgagattttatcgttcacgttgattttccggcagaagtcatccatgcatggcaaacgctgaaacatgatgcggtgctcatcgaggcgatggaaagtcgctcgttacgttaaaaattgcccgtttgtgaaccacttgtttgcaaacgggcatgactcctgacttttatttctgccttttattccttttacacttgtttttatgaagcccttcacagaattgtcctttcacgattccgtctctctgatgattgatgttaattaacaatgtattcaccgaaaacaaacatataaatcacaggagtcgcccatgtcagtacccgttcaacatcctatgtatatcgatggacagtttgttacctggcgtggagacgcatggattgatgtggtaaaccctgctacagaggctgtcatttcccgcatacccgatggtcaggccgaggatgcccgtaaggcaatcgatgcagcagaacgtgcacaaccagaatgggaagcgttgcctgctattgaacgcgccagttggttgcgcaaaatctccgccgggatccgcgaacgcgccagtgaaatcagtgcgctgattgttgaagaagggggcaagatccagcagctggctgaagtcgaagtggcttttactgccgactatatcgattacatggcggagtgggcacggcgttacgagggcgagattattcaaagcgatcgtccaggagaaaatattcttttgtttaaacgtgcgcttggtgtgactaccggcattctgccgtggaacttcccgttcttcctcattgcccgcaaaatggctcccgctcttttgaccggtaataccatcgtcattaaacctagtgaatttacgccaaacaatgcgattgcattcgccaaaatcgtcgatgaaataggccttccgcgcggcgtgtttaaccttgtactggggcgtggtgaaaccgttgggcaagaactggcgggtaacccaaaggtcgcaatggtcagtatgacaggcagcgtctctgcaggtgagaagatcatggcgactgcggcgaaaaacatcaccaaagtgtgtctggaattggggggtaaagcaccagctatcgtaatggacgatgccgatcttgaactggcagtcaaagccatcgttgattcacgcgtcattaatagtgggcaagtgtgtaactgtgcagaacgtgtttatgtacagaaaggcatttatgatcagttcgtcaatcggctgggtgaagcgatgcaggcggttcaatttggtaaccccgctgaacgcaacgacattgcgatggggccgttgattaacgccgcggcgctggaaagggtcgagcaaaaagtggcgcgcgcagtagaagaaggggcgagagtggcgttcggtggcaaagcggtagaggggaaaggatattattatccgccgacattgctgctggatgttcgccaggaaatgtcgattatgcatgaggaaacctttggcccggtgctgccagttgtcgcatttgacacgctggaagatgctatctcaatggctaatgacagtgattacggcctgacctcatcaatctatacccaaaatctgaacgtcgcgatgaaagccattaaagggctgaagtttggtgaaacttacatcaaccgtgaaaacttcgaagctatgcaaggcttccacgccggatggcgtaaatccggtattggcggcgcagatggtaaacatggcttgcatgaatatctgcagacccaggtggtttatttacagtcttaatgagtgaaagaggcggaggttttttcctccgcctgtgcgcgtcagagtttagcgaatttttcgagggtgcgaataagctgtgtgacgaagccatattcgttatcgtaccaggcgaccgttttcaccagttgtaaatcgcccacggcggtaatttccgtttgcgtggcatcaaacaccgaaccgaaatggctgccaatgatatcggaagagactatttcttcatcggtataaccaaatgactcgttattggtggttgcttgtttaagtgcgttattcacctcttcggcagtcacttttttccgagaatcgataccagttcagtgaccgaacctgttttcaccggcacgcgttgcgcatgacctttcagtttgccgctcagttccgggatcaccagaccaatggcttttgccgcccccgtagtgtggggaatgatattttctgccgctgcgcgtgaagcacgtaaatctttaccacgcgggccatccaccagtgactgggtgccagtataggcatgaatggtcgtcatcgtgccgacttctatcccgaaactgtcatgcaaggctttggccatcggcgcaagacagttagtggtgcatgacgccacggaaacaatggtgtcgttgccatccagagtgtcgtcattgacgttataaacgatagttttcatttcaccggcaggggcggaaatcaacaccttcttcgcaccagcatcaagatgcgcctgcgatttctcggcggaggtataaaagccagtacattcgacaatgatttctgcacctttcgctttccacggaatatttttagcctctttttcggcgtaaaccgcgatacttttcccatcaacgataagtgaatcttccgtaaaatcaacgctccaggggaatggtccgtagtttgaatcatgtttcagcaggtaggcgagaatttatggggaagtgagatcattaatagcgacaacgtctatgttgcttttgacttcaagtaatcgacccaacaccagtcgaccgatacgaccaaaaccgttaataccaactttactcatggttttctcctgtcaggaacgttcggatgaaaattgatcctttccaagcttagaccaggatggcgggatgggcaatctccattctcacagtgaaacgtaacgtactgaaaacgggtgaacaatatttaatgaaattttgagaaaagcccgttatgttaacggaaaattatgttaaagcaggaaatgttatggaaaataaatattcaaggttacaaatcagcattcactggctggtctttttactggttatcgcagcgtattgcgcaatggagtttcgtggtttcttcccacgtagcgatcggccactcatcaacatgattcatgtttcctgtggcatctcaattctcgtgctgatggtcgttcgtcttttgttaaggctgaaatacccaaccccgccgattatacctaagccaaaaccgatgatgacgggactggcgcatttgggacatttggtgatttatctcctgtttattgcgctgccagtgattggtttggtgatgatgtataaccggggcaacccgtggtttgcgtttggtttgacgatgccttacgcttcagaggccaatttcgaacgggtagatagcttaaagtcgtggcatgaaacgctggcgaatctgggatattttgtcatcgggttgcacgctgcggctgcactggcacaccactatttctggaaggacaacacacttctacgcatgatgccgcgtaaacgttcctgaaggatatttaaagaaaacgcctgtactaaaaccgacccgtggtacaggcgaagaatacgggtctacatcggaagcgcctattatatttatttgtatgataaataaaaccataatccttgcccatacgtccatctggcttatttttaatcaattcacccgatctttgatctcatcaacggtatcaaaataaaccagcgtataacgttcaaatcgaacataagattcgataaaccatggaggttatatgaaaaaactggcacttattttgtttatgggaacgcttgtttccttttatgccgatgccgggcgcaaaccctgttctggttcgaaaggggggatctcacactgtacggcaggcggcaaatttgtctgtaatgatggttctattagtgcatcgaaaaaaacatgcactaactgaagtgtaaaaggggtgccatgagaaaatgaatctgctagtcaaatgcgcggggaaaatccccgcgcttgcccttacctggacgtgcaggccatgagcgcagcaacctccttatcaccgtcccggaaccgcagttcgtagagcgtttgtcgggtcaggagtgtgaatgtcagaatcgtaatgcagataatgagcagacacaccaccagagggttgtgcttcatagcctttctccttgccggatggcgggtaagaggctaagatctgaattgctaggttcattcgttggcctcggttgatagaaatatcggtcggggccttcgtctttctgattcccggttagcctgaaaacagaaagtctcaggcacccgcaggcatcctatgaggtttccttagggacgaaaataatcacttcacgaaattgcgtgctgttttccagaatttttcgtcattcgggttagccagtttagccattcgttactctcttcattccaatagcattaattttctatgcaataattgttgtaaaaatgtgacgcaaagaggtttttggtcataagtaattaccgtcaagtgccgatgactttctatcaggagtaaacctggacgagagacaacggtaatgaatacaactccctcacagcgattaggttttttgcatcacatcaggttggttccgttatttgcctgcattctaggcggtatcttagttctattcgcattaagttcagccctggctggctatttcctctggcaggccgatcgcgatcagcgtgatgttactgcggagattgagattcggaccgggttagcgaacagttcagattttttgcgttcagcccggatcaatatgattcaggccggggctgcgagtcgtattgcggaaatggaagcaatgaagcgaaatattgcgcaagccgaatcggagattaaacagtcgcagcaaggttatcgtgcttatcagaatcgaccggtgaaaacacctgctgatgaagccctcgacactgaattaaatcaacgctttcaggcttatatcacgggtatgcaacctatgttgaaatatgccaaaaatggcatgtttgaagcgattatcaatcatgaaagtgagcagatccgaccgctggataatgcttataccgatattttgaacaaagccgttaagatacgtagcaccagagccaaccaactggcggaactggcccatcagcgcacccgcctgggtgggatgttcatgattggcgcgtttgtgcttgccctggtcatgacgctgataacatttatggtgctacgtcggatcgtcattcgtccactgcaacatgccgcacaacggattgaaaaaatcgccagtggcgatctgacgatgaatgatgaaccggcgggtcgtaatgaaatcggtcgcttaagtcgtcatttacagcaaatgcagcattcactggggatgacagtagggactgttcgacagggcgcggaagagatttatcgtggcaccagcgaaatttcagctggcaatgcggacctgtcatctcgcaccgaagaacaagcggcggctatcgaacaaactgccgccagcatggagcaactcactgcgacggtgaaacagaatgcggataacgcgcatcatgccagcaaactggcgcaagaggcttctattaaagccagcgatggcgggcagacggtttccggtgtagtaaaaacgatgggcgctatctccacgagttcgaagaaaatttctgagatcaccgccgtcatcaacagtattgctttccagacgaatattctggcactgaatgctgccgttgaagccgcgcgagcgggtgagcaagggcgtggatttgccgttgtcgccagcgaagtacggacactcgcaagtcgcagcgctcaggcggcgaaagagattgaaggcttgatcagtgaatcagtcaggttaattgacctggggtcggatgaggtggcaacggccgggaaaaccatgagcactattgttgatgccgtcgcgagtgtcacacatatcatgcaggaaatcgccgccgcctcggatgaacaaagtagaggcataacgcaggttagccaggcgatttctgaaatggataaggtgacgcaacagaatgcttctctggtagaagaggcctcagcggcggcggtgtcccttgaagaacaggcggcacgattaactgaggcggtggatgtattccgtctgcacaaacattctgtgtcggcagaacctcgcggagcgggtgaaccagttagtttcgctacggtgtgaaaatgttcaaggagggatcgacagatcccttcacctttcagaacggcattgattttcgaatagcgttaatcatcaactggcaaccagaagagaacgtcgcatctacgcgggtcagtattccaatcggttcgcctgcaccatgtcccggaacaggcagggccaccagcgtggcatgacgcaggtcgtcttttacagcgccagaagggacaaaccacacgtaatcgtattcaaccgtaagttgacgagatagcgaagcagacagcgtttcgatacaacccgaaggaattttacagccctggctctgcactaatgcatctgaatgctggcgtggcgcagtgccttctggtgatacaacgaccggccattccagcacccggcttagcgttacgttctcctgaagtagcgggtgattagggcggacaaccagcttcaacgattcaagaaacagcagttcgtaattaagcccggtcatcagttcaggatctgacatccgaccaatgccgatatcgatttccccggtttttaaacccgccagaatcatagggttactcattgtcgcaacttgcaaggtcgtctctttttgttgctgatgaaactgacctataaccgaaggtaatatccccagtgccgcagtaggtagtgcaccaaccctgacgacatcattattaagaccttctttacgatgaagcgaccgtccggcagtgttgatggcgtcaagaactctgactgcatgcgttaaaaattgttcgccgggtaaggtaagttgcgccccctgacgaccacgctcaaacaagcgagcgccagtcagctgctccagttcattcaatgtcttagagagcgcaggttgactcaaattaagggtttcagccgcgcgccccaaagttccttgttgtgcgacagctacgaatgtatgaaggtggcgcaaacggatgcgctgactaaacagactatttttttccataagcgatgttaaaaacgaagcggtgtcgctgacaagtgaagttgtttgattatgataacttgattgcaaaatattattaacaattaaagcaattatgttacagcaaaatggataatattgatgttttcgcggcgagatcacagtttgtaaattcttcccgcaagagtgaatgcggttacctacactccagattactgaccactggaggcagacactatggcgaacagcatcacggcggatgagattcgggaacagttttcgcaggcaatgtcagccatgtaccagcaagaagttccgcaatatggcacgctgctggaactggtagctgatgtgaatctggctgtgctggaaaacaatcctcaactgcacgaaaaaatggtaaatgcagacgagctggcgcgactgaatgttgaacgtcatggggcgattcgcgttgggactgcacaagagcttgctactcttcggcggatgtttgccattatggggatgtacccggtgagctattacgatctctcgcaggcaggggtgccggtacattcgacagcatttcggcccattgatgatgcttctctggcgcgtaatcccttccgcgtttttacctccttactccgccttgagcttatcgagaacgaaattttgcgccagaaagcggcggagattctgcgtcagcgcgatatcttcaccccacgttgtcgacaactgttagaggaatatgagcagcagggcggttttaacgaaacacaggcacaggagtttgtgcaggaagccctggaaacgtttcgctggcaccagtcagcaacggtagatgaagaaacctatcgcgcattgcacaacgaacatcggttgattgctgatgtggtctgttttcctggatgccatatcaaccacctgacgccacgtacgctggatattgaccgggtgcagtcgatgatgcctgaatgcggaattgaacccaaaattctcatcgaggggccgccgcgccgcgaggtaccgattttactacgccagaccagctttaaagcactggaagagacggtgttgtttgcggggcagaaacagggcacgcataccgcgcgctttggtgaaattgagcagcgtggcgtggcattaacgccgaaagggcgacaactgtatgatgatcttctgcgtaacgctggaaccgggcaggataatctcactcaccaaatgcatttacaggaaaccttccgcacttttcctgacagtgagtttttaatgcgtcagcaagggttggcatggttccggtaccgtctgacgccttcgggtgaggcgcatcgtcaggcgattcatcctggagacgatccacagcccttaattgaacgtggttgggtagtggcgcaacccatcacctatgaagatttcttgcccgttagcgcggcggggatcttccagtcaaatctgggtaatgaaacgcagacacgcagtcacggtaatgccagtcgcgaagcatttgagcaggcgttgggttgtccggttttggatgagttccagctttaccaggaagcggaagaacgcagtaaacgtcgctgtggtttgctttaaaatctgaccatccgcctttgcaaaaatttgcctgattttacaaacgaatcaggctcatcccatcgacataaaaaaaatgccgatttatgcatattctctcagttcaacaattggattattaataaatattgtctagagtgagcggtcataaataagcactttcttgccgctgaaaacgaccagcgcgggaccattcacaacaccagaaggactcactttcaggtatggatcgtagacgatttattaaaggttcaatggctatggccgccgtgtgcggtaccagcggcattgcttctcttttttctcaggcggcattcgcggcagattctgatattgccgacgggcaaacccagcgttttgacttctccattctacagtcaatggcgcacgacttagcgcaaacagcgtggcgtggtgcgcctcgtccgttacctgacacgctggcgacaatgacgccgcaggcttataacagtattcaatacgacgccgaaaaatcgctctggcataacgttgagaaccgtcaactggacgctcagttcttccatatgggaatgggattccgtcgccgcgttcgtatgttttctgtagatccagcaacacatctggcgcgtgaaattcactttcgcccggagttgttcaaatacaacgatgcaggtgttgatacaaaacaattagaagggcaaagcgatctcggctttgccggttttcgcgtgtttaaagcccccgaactggcgcgccgtgatgtagtatcatttctcggcgcgagttatttccgcgccgttgatgatacatatcaatacggtttgtcggcccgcggcctggcgatcgacacttacaccgacagtaaagaagagttccccgactttaccgccttctggtttgatacggtaaaaccgggggcaactacctttaccgtttatgcgttgctcgatagcgccagcattactggtgcctataagttcactatccattgtgagaaaagtcaggtgattatggatgtggaaaatcacctgtatgcgcgcaaagacattaaacagctgggcattgcgccgatgaccagtatgttcagctgcggtactaatgaacgtcggatgtgcgatacaattcatccgcaaattcatgactctgatcgtctgtccatgtggcggggcaacggcgagtggatttgccgtccgctgaataatccgcaaaaattgcagttcaatgcttacaccgacaacaacccgaaagggtttggtttattgcaactggatcgtgacttctcccattatcaggacattatgggctggtataacaaacgcccaagtctgtgggtggaaccgcgtaacaagtggggtaagggcaccatcggcctgatggaaatcccaacaacgggcgaaacgctggataacattgtctgcttctggcagccagaaaaagctgtaaaagcaggtgatgagtttgcattccagtatcgtctgtactggagtgcgcaaccgcctgttcattgcccattagcgcgcgttatggcgacgcgtaccggcatgggcggtttctcggaaggttgggcgccaggtgaacactatcccgaaaaatgggcgcgtcgttttgccgtcgatttcgttggtggtgatctgaaagctgccgcgccaaaaggcattgagccggtgattacgctttccagtggggaagcgaagcaaatcgaaattctctatattgaacccatcgatggttatcgtattcagtttgactggtatccgacttcggactccactgatccggtcgatatgcggatgtatctacgttgtcagggggacgctatcagtgaaacatggctgtatcagtatttcccgccagcgccggataaacgtcagtatgttgacgaccgcgtgatgagttaatcgttttttcttcggcaccttcttcgggaggtgccgtctggttaaacacgatcccgctcgcatttttccctaagttaaatgagtaatctgatggtgtgtatttcagatacaccttgtcagccactaacagggagtgcgtatgtttccagaataccgagatttaatatcccgtctgaaaaacgaaaatcctcgctttatgtccttgttcgataaacacaataaacttgatcatgaaattgccagaaaggaaggttccgacggtcgagggtacaatgcggaagtggtccgcatgaaaaaacaaaagctacagttaaaagatgagatgctcaaaatcctgcagcaggagagcgtcaaagaggtgtaaactttcctaagccgccagccaggcggcttttttaacaactgcatggattgactggagataagatgactgaaacgataaaagtaagcgaatcacttgaattacatgctgttgcagaaaatcacgtcaaacctctttatcagttaatctgtaaaaataaaacctggttacagcagtcgctaaactggccgcagtttgttcaaagtgaagaggacacgcgaaaaacggtgcagggtaatgtgatgttgcatcaacgcggctatgccaaaatgttcatgattttcaaagaagatgaacttatcggcgttatctcgtttaatcgtattgaaccactgaataaaaccgctgaaataggctactggctggacgaatctcatcaggggcaggggatcatttctcaggcgctgcaggcattgattcatcattacgcccagtctggtgaacttagacgcttcgtgatcaaatgtcgggtggacaatccgcaaagcaaccaggtcgctttgcgcaatggttttatccttgaaggttgcctgaaacaggctgagttcctgaatgatgcctatgatgatgtgaacttatacgcgcgtattatcgattcacaataaccctgccagcggcgttcgcgtaatgcgctcctcgccgttaatgacttttggaccacggacatgaaccgtgtcgccatcaaaggcttcaacgacggcgtggtcggttaactccacatggttttcaattatcaccgcacctgtaatacggctctcaccttgtatgacaacgtgctcgtcgagcagaatcggtccgccacgtaccacggcatttccgccaaccaagacatgatgttttaacacacaattaccttccacaatggcatattccgccacctgcgaactgtaatgaatcgtcggaatggcatcttcttctatgccagctttcacctgcgcgtgaccgtagactttagcgcaatcgcatagccagacattgttctcttcattaccttcaatactggcaaaatcaaaaacttcggcgcgatgttcaataaaagcataccggacgacggcatcgccataaatttgtgcctggtggacaatacgcgaggcgctaacccttgcgcgatcataaatttggagcaggagttgatggtcgggcgttaagccttgtgcggcgacgatcatagaatgttgatcaattaaggcgtgaccaaatattctacattgcccgtaaactaatgagtcatgaatggtgacgctgtcacttatatatgcaccctggctgatttcactattatcgatccagacgttatccgttgcgtaaacctctccccacagcacgctggtgccggtgatacgcgtattaccggaaatcaccgctccgccgaacgcaatagcattctggtcgtaaatccagcaatttccttcttgtgctaacaccgtttcgcgatcgatccagccgccagcggttcctgctatcacatcgttaaaatcgctaatggcgataatctgccgtaataacacattttttttagtgccatcttcctgataactaaaggctcgctgttcttcacttagacgatatttgcgcatagcgttttcccacaggtgacttactataaccgtagcaaattctgcggctctggctatgctcgagaaaattccataaaatgcatttcaaatatactttataaattaaacaaaatgagtaagaagatgcagagcgataaagtgctcaatttgccggcaggctactttggtattgtgttggggacgatagggatgggatttgcctggcgctatgccagccaggtttggcaggtcagccactggttaggggatgggctggtgattctggcgatgatcatctggggattattgactagcgcatttattgcccgactcatacgctttccgcatagcgtgctggcggaagttcgccatccagtgctgagcagttttgtgagtttgtttccggcaacgacgatgctggtggcgattggttttgttccgtggtttcgcccactggcggtgtgcctgttcagttttggtgtcgtggttcagttggcttatgccgcctggcaaactgcgggattatggcgcggatctcaccctgaagaagctaccacgcctggactgtatctgccgacagttgccaacaactttatcagcgcaatggcctgtggtgcgttgggctacaccgacgccggtctggtgtttttaggcgcaggcgttttctcatggctaagccttgaaccggtgatcttgcagcgtctgcgcagttcgggagaattacccacggcactgcggacatcactcggcattcagctcgctcctgcgctggtggcttgtagtgcctggctgagcgtcaacggcggcgagggtgacacgctggcgaaaatgcttttcggttatggactgctgcaactgctgtttatgctacgtctgatgccatggtatctctcccagccatttaatgcttcattctggagtttctcgttcggcgtatctgcactggcaaccaccggtttgcatctggggagtggcagcgataatggatttttccatacgctggcggtgccgctgtttatctttaccaattttattattgcaatactgctcatccgtacttttgcgcttctgatgcagggaaaattgttagtcagaaccgagcgcgccgttttaatgaaagcagaggacaaagaatgatcattcgtgacgaaaactattttactgataaatatgaattaacccgcacacactctgaagtactggaagcggtgaaagtggttaaaccgggtaaaacgctggatctgggctgtggcaatggtcgtaacagtctttacctggcagccaatggttatgatgttgacgcatgggataaaaatgccatgagtatcgccaacgtcgagcgcattaaatccattgaaaatctggataatttacacacccgagtcgttgatctgaataacctcacatttgatagacagtacgattttattctttcgactgtggtgctgatgttccttgaggctaaaaccatccccgggttgattgccaatatgcaacgttgcactaaacctggtggttacaacctgattgtggcggcgatggataccgctgattatccatgtaccgtcggcttcccgtttgccttcaaagagggagaattacgtcgatattacgaaggctgggagagggtgaaatacaatgaagacgtcggcgagctgcaccgcaccgacgccaacggtaatcgtattaaactgcgtttcgccacgatgctggcacgtaaaaaatgacccggtaagcacaaaacgcgtgaaaattccccacgctgagatgatttactgttcttcttttcggtaagcatattttttatcgaagggatgtgaaattaatcacagtagtcgaagtttttagcagcttaacttactgaaatttaagtactgatgattgacttagcccctttttcggcattgactatgtcgtctgaaaaggggctgaaaaatttattttcaccaacactttttttgccacaacacgaagcggcgctttttgctataacttagaaagtaatataatcatctcaggaaactattcatgcgtaccacatcatttgcgaaagttgcagctttatgcggcttattggctctgtctggttgtgcatctaaaatcacccagccagataaatattctggttttttaaacaattactctgatttaaaagaaacaacctcggctacaggtaaacctgttttacgttgggtagacccgagttttgatcaaagcaaatatgacagcatcgtctggaacccaatcacttattatccggtaccgaaaccgtcgacccaggtagggcagaaagttctggataaaattttgaactataccaacaccgaaatgaaagaagcgatagcgcagcgtaaaccactggttaccaccgctgggccgcgtagtctgattttccgtggggccattaccggtgtagataccagcaaagaagggctgcaattctatgaagtggttcctgttgcattagtggttgcggggacgcaaatggctacaggccaccgtaccatggatactcgcctctattttgaaggtgagctgattgatgcagcgactaataaaccggttatcaaagtcgttcgtcagggcgaaggtaaagacctgaataacgaaagtacgccaatggctttcgaaaatattaaacaagttattgatgacatggcgaccgatgccaccatgtttgacgttaacaaaaagtagttccagacgcgccatcgttagatggcgctttttatccggtgcgccgtaaaaccccatccttcagggcggggatataaggcgcggttttccacctgaccaggtgtttgctgttgttcaatgtattggcggatgacggatattggcgcacctccgcagctactggcaaaatagccaggactccacaaaacgcctttgtagtaatacctgaatgcaatatctggtcgatctcgtcgcagtcacctacccgatacgcctttgaggctgtttaccagactggatatcgccagtttgggaggatagttaattaacaaatggacgtgatctggttcgccatccatttcaaccagttcagcttcaaaatcagcacatacatttgaaaagtaagtgcgtagtttttctgtcgcgtcatggtcaaaaatctggcgtcggtatctggtgacaaagagcaggtgaacatgcatcaggaaaacacaatgccttccacgccggatatcggtttcttttttcacagaccaaagtatcatttgacctgtgaaacgattacaggcatttaaattccagttaagacccggtggtcaacaggagtgtgaaatgaggcgcttcgcaggcgcatgtcgtttcgttttcaatcgtgctctggcacgtcagaatgagaatcatgaggccggtaataaatacatcccttacgggaaaatggcttcctggctggttgagtggaaaaatgccactgaaacgcaatggcttaaagattctccctcacagccattgcaacagtcactgaaagaccttgagcgggcttacaaaaacttcttccggaagcgggctgcttttccccgattcaaaaagcggggacagaatgatgcattccgctacccgcagggcgttaagctcgatcaggaaaacagccgtatttttctgccgaaactgggctggatgcgctaccggaacagccgtcaggtcacgggtgttgtgaaaaatgtcactgtcagccagtcctgcggtaagtggtacatcagtattcagacagaaagtgaagtatcaactccggttcacccttcagcatcaatggtcgggctggatgctggcgtggctaaactcgccacgctgtcagatggcacagtctttgagcctgtaaacagttttcagaaaaaccagaagaagctggcgagacttcagcgacagttaagccgcaaggtcaaattcagcaacaactggcaaaagcagaaacgcaaaatacagcgactgcattcctgtatcgcaaatatccgcagggactaccttcacaaagtcacaacggccgtcagcaaaaaccacgcaatgatagtcattgaggatttgaaggtcagcaacatgtcaaagtcagcagcgggtacggtcagccagccggggcgcaatgtccgggcaaaatcaggtttaaaccgttcgatactggatcagggctggtatgaaatgcgccgccagcttgcgtataagcagctctggcgtggcggtcaggtgcttgctgttccgccagcgtatacaagccagcgttgcgcgtactgtggtcatacagcgaaagagaaccgcctgtcacaaagtaaattcagatgccaggtatgtggatatacagcgaacgccgatgtaaatggcgctcgcaacattttagcggcggggcacgccgttcttgcctgtggagagatggtgcagtcaggccgcccgttgaagcaggaacccaccgaaatgattcaggcgacagcctgaacgtagcagggatccacgtccttcagggcgtggaggatgtcaatatcggtttctgtcagcgattaaattcaacaccacgtaacaaacgcctccggcaattaatccccaaaacgcagaaccaatcccgaccagcgtcaatccacttgccgttaccagaaatgccaccaccgccgcgtctcgctcacgctcattatgcagcgcctgatacaaactgccgccgatggtacttaacagcgccagacctgccagcatctggatccaacttacgggcagggcagccatcatcccggtaatggcactaccaaacagacctgcgagcaaatagaaaatgcctgcaacggcagcggccagccaacgttgatctttatccggatgcgcttccgggctttggcaaatagccgcggtgattgccgcaataccgacggaataaacgccgaaaggggaaaaaaccagtgccagcaatccagtaaatacaattaatggcgaaacaggagccgaatatccagctgctttcattgctgcgatacccggtgcgttttgcgatgccatcgtcaccagaaaaagggggagtgcaacgctcaggctgtgagcaaacgaaaaatcaggggtaatataagtggggagaacgggtttaaagacaacatcagttgtgacaacgtcaccttgcgcgatgacgatcacgatcccaataatcatcgcggcaattaccgcatagcgcggcgcaacggccttggttgccagccataccagcaacatacttccacacaacgtaaattgaccgtccagactggcaaacgcctgtaaaccaaagcgtaataaaatcccggcaagcattgccgccgcaagcgagtgcggaataatgcgcatcagacgagcaaagagtcccgttatgccgcagaggactattagcgcgttggtgacaataaaaacgccgatggcttcgttaagtgttagtccctgcaatccggtgaccaacaaagccgcgccaggcgttgaccatgcggtgagaacaggtacgcgataccataatgtcagagtcagcgtactgacgcccattgccagccccagcgccgtcatccagccagagatttgtgcagtggtggctccggcgacaatcgctgcttgccagattattgccgctgaactggcgtagccaattaataccgccagaaaccccgccagtagcgtgggtggaggaatagaaaacagacgcatagtcacctcgtgcgttatagcgtacaggcaccgtagcatttgtccgttataacgcacaagtgataaacttccgttttgccggaggagtcgcatggaaaatctcgctcgctttttatccaccacacttaaacaactacgccagcagcgcggctggagtctttcgcgactggcagaagcgacgggcgtttctaaagcaatgttagggcagattgagcgtaatgagtccagtccgacggtcgcgacattatggaaaattgccaccgggttgaacgtaccattttcaacatttatttctccgccgcagtccgctacgccttcagtttatgatccacaacagcaggcgatggtgatcacttcgctgtttccttatgatccacaactctgctttgaacacttctcgattcagatggcatctggtgcaataagcgaatcgacgccccatgagaagggggtaatcgaacatgtcgtcgtcattgatggacaacttgatctgtgcgttgatggggaatggcagacccttaattgtggggaaggcgttcgatttgctgcagacgtcacgcatatctatcgtaatggtggggagcaaaccgtacattttcattccctcatccattacccgcgcagttaagcgggaaaactatttcgcaacgtcgcgcttgtggctaaaatagccgccatttttcagctactggataagaatgtgaccgtatcttctcatcgacttgaactgttaagcccggcacgcgatgccgccattgcccgcgaagctattttgcacggtgccgatgctgtttatatcggcggccctggttttggtgcccgtcataatgccagtaatagcttgaaagatattgccgagctggtgccgtttgcccatcgttatggtgcaaaaattttcgtcacgcttaacaccattttgcatgatgatgagctggaacccgcgcaacggctgattactgacctctaccagaccggtgtcgatgcgctgattgttcaggatatggggattctggaacttgatattccgccgattgaactgcacgccagtacgcagtgcgacattcgtacagttgaaaaagcgaagttcctctctgatgttggcttcacgcagattgtgctggcgcgagagctgaatcttgatcagatccgcgcgattcaccaggctacggacgcgaccattgaattctttattcatggggcactgtgcgtggcctattcgggtcagtgctacatttctcatgcgcaaacagggcgtagcgccaaccgtggcgattgctcgcaggcgtgccgtttgccatacacattgaaagacgatcaggggcgggtggtttcctatgaaaaacatctgctgtcgatgaaagataacgatcagactgccaacctcggcgcgctgattgatgctggtgtacgctccttcaagattgaagggcgttacaaagatatgagctacgtgaagaatatcaccgcccattatcgccagatgcttgatgccattattgaagaacgtggcgatctggcgcgcgcttcatcaggtcgtactgaacatttctttgttccatcgacggaaaagactttccaccgtggtagcacagattattttgtgaatgcccgtaaaggcgatattggcgcgttcgattcgccgaaatttatcggcctgccggtaggcgaagtagtgaaagtggcgaaagatcatctcgatgttgccgttaccgagccactggcaaatggcgatggcctgaacgtgttgattaaacgtgaagtcgtcggttttcgtgccaatacggtcgagaaaaccggagaaaatcagtaccgcgtctggcccaatgaaatgccagcagatttgcacaaaattcgtccacatcacccactaaaccgtaatcttgatcataactggcagcaggcactgacaaaaacctccagcgaacgtcgggtggcggtagacattgaactgggcggctggcaggaacaactgattctgaccctcaccagtgaagagggtgtcagcatcacgcatacgctggacgggcagttcgacgaagccaataacgccgaaaaagcaatgaacaatctgaaggatggtctggcaaaactggggcaaaccctctattacgcccgcgatgtgcaaattaatttgccgggggcgctgtttgtaccaaacagtctgttaaaccagttccgccgtgaagctgctgacatgctggatgctgcgcgtcttgccagttaccagcgcggcagccgtaaaccggttgctgatcctgcgccggtttatccgcaaacgcatctgagtttcctcgcgaacgtatacaaccagaaagcgcgtgaattttatcatcgctatggtgtgcagctgattgacgcggcgtatgaagcacatgaagagaagggcgaagtcccggtgatgatcaccaagcattgtctgcgctttgcctttaatctgtgcccgaaacaggcgaaaggcaatatcaaaagctggaaggcgacgccaatgcaactggttaacggcgatgaagtattaacgctaaagtttgattgccgcccatgcgagatgcacgtcattggcaaaatcaaaaatcacatactgaaaatgccgttaccgggaagcgtagtggcatccgtaagtccggatgagctgctgaaaacattgccgaagcgaaaagggtaaaacgccagttttctggttactcacaacttattgaatctgcatgatattgcctgccgggtaaggcgttacgccgcatccggcatcaaatgactcaacgttgtcccgcttctggtttgcgcgatttttgccagtaaaaatgctcgcgcaaaccttccgccgactcttccgccacagcacgcaattcatcgctgtccgcttcatgacgcagctgatgatccacattctttacccacacaaattcatgtcctttgtgccctgccatgagttgtcctgaaaacagagcacacgttaataagacaaccgataacgccttcgtaaacatcctgccacctttttcttaccttttgccgctatgatgccgatcgtttcttgaggttattattcagttttgcaaattagcgcaaagaaattctggaatcttccttcctgattttgcattgcattctgccgttgcggcgatttagtgctattttcgagcaaattacacacggaggtaaacactaatgtttactttgttgatatactcagcggcagggaggcgatgtgaaacaaagcgagttcagacgttggctcgaatctcagggcgtcgatgtagcgaatggcagcaaccatttgaaactcaggtttcatgggaggcgcagtgtcatgccgcgtcacccctgcgatgagattaaagaaccattgcgtaaagcaatcctgaaacaactcggtttgagttaatcgccaattaaaaaggttaatgacatgcgagagacagtcgaaattatgcgttatcccgtcactcttacacccgcgccggaaggcggttatatggtttcttttgtggatatccctgaagcgttgacccagggcgaaactgtcgctgaagcgatggaagcggcaaaagatgctttactgaccgcatttgatttttattttgaagataacgagcttatccctttaccttcgccattaaatagtcacgatcactttattgaagtacctttgagcgtcgcctctaaggtattgctgttaaatgcttttttacagtcagaaatcactcagcaagagttagccaggcgaattggcaaacctaaacaggagattactcgcctatttaacttgcatcatgcgacaaaaatcgacgccgtccagctcgcggcaaaggcgcttggcaaagagttatcgctggtgatggtttaattacagttaacgaaaagttgtcatttttaacaactgatatagactgccgaatcatctgcacataattacgattcgataatgaaaaaataccagcagcttgcagaacaattacgcgagcagattgcgtcgggtatctggcaacccggcgatcgtttgccttcgttgcgtgaccaggtggcgctttcaggcatgagctttatgactgtcagccatgcctatcagttgctcgaaagtcagggatatattatcgcacgaccgcagtcgggttattacgttgcgccacaggcaataaaaatgccgaaagcgccagtcattccagtcactcgagatgaagcagtcgatatcaacacttatatttttgatatgttgcaggccagtcgcgatccgtcggtcgttccgtttgcctcggcctttcccgacccgcgacttttccccctccaacaactaaaccgctcgctggcgcaggtaagcaaaaccgccacagcgatgagcgtgattgaaaacttaccgccaggaaacgcagaactgcgtcaggctattgctcgtcgctatgccttacagggcatcaccatttctcctgatgaaattgtcattactgccggggcgttagaggcattaaacctcagtttgcaagcggtaactgaaccgggcgattgggtgatagtagagaatccttgtttctacggtgcgttgcaggcgctggagcggctacggctgaaggcgttatcggtggcgacggatgttaaagaagggatagatcttcaggcgctggaactggcgttgcaggagtatccggtgaaagcgtgctggctgatgactaatagccagaatccactcggatttaccttaacgccgcaaaaaaaagcacaactggtggcgttgctcaatcagtacaacgtaacgctgattgaagatgacgtttacagcgaactttattttggacgggaaaaaccgctgcctgcgaaagcgtgggatcgccacgatggcgttttgcattgctcttcgttttcgaaatgtctggtgcctggttttcgtattggttgggtcgccgccggaaaacatgcacgtaaaattcaacgcttgcagttgatgagtacgctttccaccagctcaccgatgcaacttgcgctggtggattacctttccacgcgccgatacgacgcccatcttcgtcgcctgcgtcgccagcttgcggaacgtaaacaacgtgcctggcaggcactgctgcgttatctgcctgcggaagtgaaaattcatcataatgacagtggttactttctctggttggagctccccgagccgttagatgccggcgaattaagcctggcggcactgacgcatcatatcagtattgcgccgggtaaaatgttttctaccggtgaaaactggtcacgttttttccgttttaataccgcgtggcagtggggagagcgtgaagaacaggcggtaaaacaattaggcaaacttattcaagaacggctgtaatagcgtttaatttaattcctcttagattgggtaatatgaatttcgaatagcagtcatatttcctaactccttgactatactccagaagataaccttacagacggcataatgcgcggtagctcacaacctgaataaattttctcaggggcgaaggtgtgcctgcaagccgccgtctatggttaaacaaggagatatttttacggcacggcggctgaacaattaattacgacaggagtaagaccttatgagcaagacatttgcccgcagcagcctgtgtgcgctcagcatgacaataatgaccgctcacgccgccgaaccgcctaccaatttagataaaccggaagggcgactggatattatcgcctggccgggatacatcgaacgcggacaaactgataaacaatacgactgggtaacgcagttcgaaaaagagacaggctgcgcggtgaatgtgaaaaccgccgcgacttccgatgaaatggtcagtctgatgaccaaagggggttacgatctggttacggcatccggcgatgcctcgctgcgtttgattatgggtaaacgcgtgcagccgattaataccgcattgattcccaactggaaaacgctcgatccgcgcgtggttaaaggcgactggtttaatgttggcggcaaagtttacggcacaccttaccaatgggggccgaacctgctgatgtacaacactaaaaccttcccgacgccgccggatagctggcaagtggtttttgttgagcaaaatctgccggacggcaagagcaataaaggccgcgttcaggcttatgatggccctatctatattgcggacgctgcgttgttcgttaaagccactcagccgcagttgggcatcagcgatccgtatcaactcaccgaagaacagtaccaggcggtgctgaaagtgctgcgcgctcaacacagtttgatccatcgctactggcatgacactaccgtgcaaatgagcgatttcaaaaacgagggtgtggttgcttccagtgcctggccctatcaggccaacgccctgaaagccgaaggccagcctgttgctaccgttttcccgaaggagggtgttaccggttgggctgataccaccatgctgcatagcgaagcgaaacatccggtttgcgcctacaaatggatgaactggtcattaacgccaaaagtgcagggcgatgtggcggcctggtttggctcgttaccggtagtgccggaagggtgtaaagccagtccgttattaggcgaaaaaggttgtgaaaccaacggttttaactatttcgacaaaatcgccttctggaaaacgcctatagcagaagggggcaagtttgttccctacagtcgctggacgcaggattacattgccattatgggcggtcgctaacttcgctggggtgctttatgacgtacgcagtggagtttgacaacgtctcgcggttgtacggtgacgtgcgcgcagtagatggcgtcagtattgcgataaaagatggtgagttcttctctatgctggggccgtccggctccggcaaaaccacctgcctgcgcctgattgctggcttcgaacagctttccggcggggctatctctatctttggtaaacccgccagcaatctgccaccgtgggagcgggacgtgaatactgtctttcaggactacgcgctatttccgcatatgtcgattcttgacaatgtcgcctatgggctgatggtcaaaggcgtgaataaaaagcagcggcacgcaatggcgcaagaggcgctggagaaagtggcgttggggtttgtacatcaacgtaaaccgtcacaactttctggtggtcagcgccagcgggttgctatcgccagagcattggtgaatgaaccgcgcgtattgctgttggatgaaccgctcggcgcactggatctcaaattgcgtgagcagatgcagctggaactgaaaaaactgcaacagtctctcggtatcacttttatcttcgttacccacgatcagggcgaagcgttatcgatgtccgatcgtgtggcggttttcaataatggacgcattgagcaggtcgattccccgcgcgatctctatatgcgcccgcgcacgccgtttgttgccgggttcgttggtacatcgaatgtttttgatggactgatggcagagaaactttgtggcatgacgggaagcttcgccctgcgaccggaacatatccgcctcaacacccctggtgaactgcaggccaatggcacgatccaggcggtgcaatatcagggcgcggcaactcgttttgaactgaaattgaacggcggtgaaaaactgcttgtgagtcaggccaatatgacaggcgaagaactgcctgccacgctcacgcccggacaacaggtgatggtttcctggtcgcgtgatgtgatggtgccgctggttgaggagaggtgaatggcgatgaatgtattgcaatcaccttcacgtccaggtctgggtaaggtgtccggtttcttctggcataatccggggctggggctgtttttactgctgcttggcccgctaatgtggtttggcattgtctatttcggctcgctgctgacactgttatggcagggattttatacttttgacgatttcaccatgtcggtaacgccggaactgacgctggcgaatatccgtgcgctgtttaatccggcgaattacgacatcattctccgcacgctgactatggctgtggcagtcactatcgccagcgccattctggcttttccaatggcgtggtatatggcgcgctataccagcgggaaaatgaaagcgtttttttatattgcggtaatgttgccgatgtgggcgagctacattgttaaagcctatgcctggacgttattgctggcaaaagatggcgtggctcagtggtttttacaacatcttgggctggaaccactgctgactgcgttccttacattacctgcggtgggcggaaatacgctgtcaacttccgggctggggcgctttctggtgtttctctatatctggttgccgttcatgatcctgcccgttcaggcggcgcttgagcgtttgccgccgtcattgttgcaggcgtcggctgatctcggcgcacgtccacgacaaacctttcgctatgtggtgctgccgctggcaatcccgggtattgccgctggctctatctttaccttctcactcacactgggcgattttatcgtcccgcagctggttggtcctccaggatattttatcggcaatatggtttattcccagcagggggcgattggcaatatgccgatggcggcggcattcaccctggtgccgattattctcatcgcactgtacctggcgttcgtgaaacgtctgggagcgttcgatgcactctgaacgcgcaccgtttttcctcaaactggcggcctggggcggcgttgttttcctacattttcccatcctgataatcgccgcctatgcgtttaacactgaagatgcggcgtttagttttccaccgcagggcctgacgctgcgctggtttagcgtggcagcacagcgtagtgatattcttgatgccgtgacactgtcacttaaagtggcggcgctggcgacattaattgcgctggtgttagggacgctggcagctgccgcgctgtggcgacgagactttttcggcaaaaacgccatttcgctgttactgctgctgcccattgcgctgccgggcattgtcactggtctggcgttattaaccgcctttaaaaccatcaatctggagccgggatttttcaccatcgtggtcggtcatgcgactttttgtgtagttgtggtgtttaacaatgtcatcgcccgttttcgccgcacctcctggagtctggttgaggcgtcaatggatcttggggccaatggctggcaaaccttccgctacgtagtgttgccgaatctcagttcggcgttactggcaggaggaatgctggcgtttgccttgtcgttcgatgaaatcatcgttacgacctttacggcaggtcatgaacgaacgttaccgttgtggttgctcaatcagcttgggcgaccgcgtgatgtaccggtaactaacgtggtggcactgctggttatgttggtaacaaccttgccgatcctgggggcctggtggctaacccgcgaaggcgacaatggtcaataaccactgatacaggaatatgctatgcaacataagttactgattaacggagaactggttagcggcgaaggggaaaaacagcctgtctataatccggcaacgggggacgttttactggaaattgccgaggcatccgcagagcaggtcgatgctgctgtgcgcgcggcagatgcagcatttgccgaatgggggcaaaccacgccgaaagtgcgtgcggaatgtctgctgaaactggctgatgttatcgaagaaaatggtcaggtttttgccgaactggagtcccgtaattgtggcaaaccgctgcatagtgcgttcaatgatgaaatcccggcgattgtcgatgtttttcgctttttcgcgggtgcggcgcgctgtctgaatggtctggcggcaggtgaatatcttgaaggtcatacttcgatgatccgtcgcgatccgttgggggtcgtggcttctatcgcaccgtggaattatccgctgatgatggccgcgtggaaacttgctccggcgctggcggcagggaactgcgtagtgcttaaaccatcagaaattaccccgctgaccgcgttgaagttggcagagctggcgaaagatatcttcccggcaggcgtgattaacatactgtttggcagaggcaaaacggtgggtgatccgctgaccggtcatcccaaagtgcggatggtgtcgctgacgggctctatcgccaccggcgagcacatcatcagccataccgcgtcgtccattaagcgtactcatatggaacttggtggcaaagcgccagtgattgtttttgatgatgcggatattgaagcagtggtcgaaggtgtacgtacatttggctattacaatgctggacaggattgtactgcggcttgtcggatctacgcgcaaaaaggcatttacgatacgctggtggaaaaactgggtgctgcggtggcaacgttaaaatctggtgcgccagatgacgagtctacggagcttggacctttaagctcgctggcgcatctcgaacgcgtcggcaaggcagtagaagaggcgaaagcgacagggcacatcaaagtgatcactggcggtgaaaagcgcaagggtaatggctattactatgcgccgacgctgctggctggcgcattacaggacgatgccatcgtgcaaaaagaggtatttggtccagtagtgagtgttacgcccttcgacaacgaagaacaggtggtgaactgggcgaatgacagccagtacggacttgcatcttcggtatggacgaaagatgtgggcagggcgcatcgcgtcagcgcacggctgcaatatggttgtacctgggtcaatacccatttcatgctggtaagtgaaatgccgcacggtgggcagaaactttctggttacggcaaggatatgtcactttatgggctggaggattacaccgtcgtccgccacgtcatggttaaacattaaggataatattgcagatcgtaagagtatgagatgatcttgcgtactgtcagagcactgatttctctgacagtacgtgctgcgtgcaaaatcactacatcaaataaaccagccaaatctcatagagataagagtaaacaaaccaacagcagcaaagaaatttatcagtactacagttctactggaaacattcatttttgccaccttttatcattgcccctatgtgtatagtacgggttaagaaaatccgcaataatactcattctgaagatggataagggcaagttgctgtttgatgattttttctcaaactggtgaaaaaacttgatgcacgtcaaaaaatgacgcatatttgcgcgcgttttattcatctggctggacgcccgtacatgtctctctatcaacacatgcttgttttttatgcggttatggcagcaatcgcatttcttatcacctggtttctttctcacgataagaaacgcatccgtttcttaagcgcctttctggtgggggcaacatggccgatgagtttcccggtggcgctgttgttttcactgttttaaatcttactcactggcttgacggcaccacgcagacttatatcatttggatgaatcgataaatttcacaagtggctaaggagaaagtatgtcgcatctggatgaagtcatcgcgcgcgtggatgccgcgattgaagagagcgtcattgcccatatgaacgaattattaatcgccctgagcgatgacgcggagttaagtcgggaagatcgctacacccagcagcaacgtctgcgcacagcgatcgcccatcacggtcgcaagcataaagaagatatggaagcgcgccacgaacagttaaccaaaggcggcaccatcctctgattaaaatgagcgtctggctaccaaccaggcgccaaccacaagtaaaattgcgccacaaattgggccgaacaacgcccgtagtggtacgccatgactgcggaagatatccagcatcagaccgccaatcagctgactggcgaccagtacagcaatagttgtcgccgctcccacattctgatatccgctgatactggcgaagacaaaaaacgatcccagcaagccaggtataagtgtccaccagcgcacgctggacaccagttcgccaaaccccgccatgccttgtttaaaccataaaatagaaacaaagagcacaatccccaccagtgagttcagcaacatggcgatgagaatggtagaggaggtctgggtgatgcgcaccatcagcgtgttctggacaaccagaccaattccggcggcaatcaaaaaagcaagggtgagcgactgattcatccaatcgcgtccggttcagtgcgctcgtcgagttgcaactgcataaatgtcagatccagccaacgaccaaatttagtgcctacctgcggcatttgcgcggtgacgacaaatcccagcgactggtggagatgcagcgaggcctgattttgcgattcgatcccggcgaccatgacatgcttcccgcaatcccgcgcttcatcaatcaatcggcttaacaatttacgccccagacctttgccctgatgatcgggatggacataaaccgaatgttccacggtatggcgaaaaccatcgaaactacgccagtcgccaaacgaggcatatcccgtcactacgccgttttcctcgctcaccagcactggataacctgctaaagtccgcgcttcaaaccaggcaatgcggttatcagcatccaccgtttggtcattccagatagccgccgtatacaacacggcgtggttataaatttccgcaatggcagcacagtcggctttgcgggcaaaacggatggacatgtctggcctcaataaaataatgatgatgatgttatcaatactatcgaaaacagcccgaagcaacggattcctcgatgaaattattgcgtgttgcagaggggatgtgacggctgcaaacaaaaccaatcccgtgagcctgctactattgatggattcatgccaaaagcacaggagagcattatggggcaacaaaagcagcgtaatcgacgttgggttctggcctcgcgtccacatggcgcacctgttccggagaatttccgtcttgaagaagatgatgtcgccacaccgggtgaaggacaggtgttactgcgcacagtttatttgtccctggacccgtatatgcgtggacgtatgagcgatgagccatcttattcaccgcctgttgatattggcggcgtgatggtcggcggtacggtgagccgtgtcgtggagtcgaatcatcctgattatcagtctggcgactgggtgctgggctacagtggatggcaagactatgacatatccagtggtgatgatctggtgaaacttggcgatcatccgcaaaatccatcgtggtcgctgggtgtgctagggatgccaggctttaccgcttatatgggcctactggatatcggtcagcctaaagagggcgaaacgttggtggtagctgcggcgacaggaccagtgggggcgacggtggggcaaatcggcaaacttaaaggttgcagagtggtgggggtagccggtggcgcggaaaaatgccgccatgctaccgaggtgttaggcttcgatgtttgtcttgatcaccacgcggatgattttgccgaacaactggcgaaagcgtgcccaaaaggtattgatatctattatgaaaacgtgggcggtaaggtattcgatgcggtgctaccgttacttaatacatctgcgcgcattcccgtctgcggattagtgagcagctataacgctacagagctaccacccggtccggatcgtttacctctgttgatggctacagtgctgaaaaaacgtattcgcttgcaaggttttattatcgctcaggattatggtcaccgcatccatgagtttcagagggagatggggcaatgggtgaaagaggataaaatccactaccgcgaagaaattactgacggtttagagaatgcgccacagacgtttatcggcctgctgaagggtaaaaacttcggcaaagtggtgatccgcgtggcgggtgatgattaaagtttcaacggcggcgtaagccgccataaaaatccaggcaaaaagcttattttcagctttaattaactaaccacatcattgttctgctgctaataacaacaaaggtgagtggtttatgattattcactttaatacaccaggtgaattccttctgccatgcaggcagggttggacagaaaacacgcgaaggaattaaaatgcctggaacgggaaaaatgaaacatgtcagtttgactctgcaggttgagaacgacctgaaacatcagcttagtattggcgcattaaaacctggcgcacgcctgattactaaaaatctggcggagcaattaggtatgagtattacacctgtgcgtgaagcattattacgtctggtttcggtgaatgcgctttctgtcgcacctgcacaagcatttacagttccggaagtggggaaacgtcaattagacgaaatcaatcggatccgctacgaactggaattaatggcagttgctctggctgttgaaaacctcaccccgcaagaccttgcggaactccaggaattgctcgagaaattacagcaggcgcaagaaaagggcgacatggaacaaatcattaatgtaaacaggctatttcgcttagcgatttatcatcgctcaaatatgcccatcctgtgtgagatgattgagcaactgtgggtcaggatggggcctggtttacattatctctatgaagcgattaatccagcggaattacgggagcatatagaaaactatcatctgttactcgctgcgttaaaagcaaaagacaaagagggatgcagacattgtcttgctgaaattatgcaacaaaatattgctattttataccagcaatacaatcgttaaagtaaatgcccggcaaataccgggcatcaaggtaattactcaaatctccacgcaatattcatgccgacaccataatttcgtccgggcgaaggttcgtaatatcgcccgtttgactcattgacaatgacagaaccaacgtattctttatcgaataaattatcgacacgaccaaataaatccacagttaaattgtggtaattgtatttatacccggtgaataagccgacgagagtataagacggcgcttttgccgtattttcatcatctgccataatatcgcccatataacgcgcttccgtgcctgcataccaaccatcttccggtacataacctatcgacgcaaagcccatattacgggcgatccctggcatccgattaccgttacaatcctgttcattgcaaacattgctgcgataggtcgcatcaagccaggtccaggacgcgtttacgcgaaaatctcctgcgaaacgttgatcccatgccagttcagcgccttgacgacgggtctttccggcatttttgtaagtcgtacgcccaccgctactgctatcgacaacaatttcatcatcagtgtcggtctgaaacaatgcgagactaagcagcccatcaccaatacgcgttttactgccgatctcaattgtatcgttggtggatggttttaaacctaagttcataccgctttgcccatcagcacgataagacagctcattaatcgtcggcgtttcaaaacctcgcccggctgccagatagatattccaggcatcggtcattgcatattttaacgaaccggcaggtagccatttatgataactggcatcaccgctgtcatcgccgttacccggagtaacgtaatggtcgttggaatcaaaccacacggagctgtagcgcacgccagcatccagcgacagtttttcgctcagctgccactgcgtctgtaaatagggatcgatgttccacatcagattgcgttcgtcgcgacgcaactcacctttttgcccgtactccggcatgccgctattcaggcggaagttattgtagcccttgcggttttcactcatgttttcgtagttcaggccggtagtgaacgtgaccggaacgcccagttcaccacggtgtgtccagcggctgtctattccctggtaatggcgttgcagggtaatcacgccgcccgcatgtgacgggttaagttgtggtgccatgggtattgactggtactgggtcgtttctcgctctccggcatacatcatcacactcatatcatcccgcgaactcaggctacgctcatagcgcaacccagcctgagtttgcttgatggtttttcgcgtgtcgtactgttctgcacgaggcgcttgttgtggattagccttccattctgctttggttagcccacctgggtcatctgctttgatatccacactattgaaaatcagacttaatttgctggcttcatcaatgcgtacgcccagtttggcattggctaaatttttctgtgcgccactatggtcacgatagccgtgggtcgtaaaacgcgtggttgagacggtgtaatcgacatcgccaggctgtgtgccgtctcccgttgcgcccgttgctttcagcccatagcgccagctgccaaaactgccgtagtaactactggcttcaatggttggtggctgttgtccggtctgggtggtgacattcattaccccaccagacgcgttgccatacagggcagagaaggggccacgcagcacttccacattttgcacactgcttaaatcgatgttggatgtttgcccttgcccgtcgggcatggtggcgggaataccgtccacatacaggcgaataccgcgaataccgtaagtggagcgggagccaaatccgcgaatcgacagctgtaaatcttgcgcatagttctgccggttttgtacctgcaaaccaggcacgccggtcagtgattcggacaagttaatgcgcggtgttgccaggcgcatctcctcgccatccaccacgcttactgctgctggggtatccagttctgaaaccacctgcggtgcggcactgacaatcatagtctgttcatcagcggcaaaaacaacgggggaaaggacaagcagtgcgggcaaaacggtctgtcggacggaaaaaatcttcatgaaaaaagccaggttaagaatgggaaaacgccgtcatggtaatgaaattgtaaatttatggaaaatgaaacggcacaatacgttaagtaattgagaaaattgtagtcgtaacggcaagaaatgctccacatttgagaaaataatgattaccattcccatttataacaagagcgtaacgatgattacgcttagcgaagcattgtgaagcagcaaaaatatcggttcatcaaagggagtcgtcatgcatttacgtcatctgttttcatcgcgcctgcgtggttcattactgttaggttcattgcttgttgtttcatcattcagtacgcaggccgcagaagaaatgctgcgtaaagcggtaggtaaaggtgcctacgaaatggcttatagccagcaagaaaacgcgctgtggctcgccacttcgcaaagccgcaaactggataaaggtggcgtggtttatcgtcttgatccggtcactctggaagtgacgcaggcgatccataacgatctcaagccgtttggtgccaccatcaataacacgactcagacgttgtggtttggtaacaccgtaaacagcgcggtcacggcgatagatgccaaaacgggcgaagtgaaaggccgtctggtgctggatgatcgtaagcgcacggaagaggtgcgcccgctgcaaccgcgtgagctggtagctgacgatgccacgaacaccgtttacatcagtggtattggtaaagagagcgtgatttgggtcgttgatggcgggaatatcaaactgaaaaccgccatccagaacaccggtaaaatgagtaccggtctggcgctggatagcgaaggcaaacgtctttacaccactaacgctgacggcgaattgattaccatcgacaccgccgacaataaaatcctcagccgtaaaaagctgctggatgacggcaaagagcacttctttatcaacattagccttgataccgccaggcagcgtgcatttatcaccgattctaaagccgcagaagtgttagtggtcgatacccgtaatggcaatattctggcgaaggttgcggcaccggaatcactggctgtgctgtttaaccccgcgcgtaatgaagcctacgtaacgcatcgtcaggcaggtaaagtcagtgtgattgacgcgaaaagctataaagtggtgaaaacgttcgatacgccgactcatccaaacagcctggcgctgtctgccgatggcaaaacgctgtatgtcagtgtgaaacaaaaatccactaaacagcaggaagctacccagccagacgatgtgattcgtattgcgctgtaatagatatggcgagggtgaaaacggtgagacttgcctgccttttatcacggcgtatccggcactttcgtcagtaatctgaatttgcccggcacgtagccgggcaattttgcaattaactcgccgtttcaggcttaaacacaatttcctgtttttcttcatcttcctcgacgactggcgcagtgctgtgaatttcagcaacgcgtttgcgcacaccaaaccagcctataaccagcaaaataccgataatcggcagcgccgcgatagtataagtcccgttcgggtaatcgaacgccatcagcacaaggacactcagtaaaaacagtaatgtcagccaggaagtgaagggcgcgccaggcagtttaaaactgacatccgctgctttgccttctttaatcgctttacgcaggcgcatctggcacacgatgataaacgcccatgaagcgatgattcccagcgacgcgaagttcaacacaatctcaaatacgcgcgacggcaccagatagttgaggaatacgccgacgacatacacaactagtgtcgccagaatcccggcatacggcacatgctgacgactcattttcgccataaaactcggtgcggaaccgcccatcgccattgagcgcagaatacgtccggtgcagtacagacctgaattcaggctggagagggcagcggtcagcaccacaatgttcataatgctgccgatatatggcacacccagtttagagaaaaacgtcacgaacggactttgccccgcctgatacgcgctccacggcaataacataaccagcaacaccacggagccgacgtaaaacaggccaatacgccaaatcacactgttaatggctttaggcaccatggtctgcggatctttacattctccggcagctgtacccaccatttcaatggaggcaaaagcaaacactacgccctgaatcaacaccagcgcaggcagcaaaccgtgggggaagaagccgccattatcggtgattaaatgaaagccagtggtgttgccatccagcggctgaccactaccgaggaacactgtacccacgaccaaaaaggtcacaatggcgagcactttaataagcgcaaaccagaactccatctccgcaaaccatttcacaccgatcatattcatggtgccaacgatggtaagtgcagcgagcgcaaagacccactgcggcacgccgccaaacgcaccccagtaatgcatatacagagcgacggcggtaatatcaacaatccccgtcatcgcccagttgatgaagtacatccagccagcaacataagcggctttctcacccaaaaactcacgggcataagaaacaaaactgccactggaagggcggtgtagcaccagctcacccaatgcacgcagaataaaaaacgaaaacaagccacaaattaaataaaccagtgccagtgcgggccccgccatttgcagtcgggctcctgcacctaaaaacaagccggtgccaatcgcgccgccaatggcgatcatctgcacctggcgattgcccatcgctttgtgatacccctcttcgtgggcattaagccagcggcgtttcgcggcgtgttgatctgaagtgtcggtgtcgtgtttactcattgctctccctgattgctttaatgaaaaagtcatataagttgccatgaacaatgtttattcatcctggcgatgatagttatcaccattattctttatgggtataaaactatcggcgcagcatcctacccgttatcgataaacgatgcaaaacatccccttacaatcctgaaggggattaatacaactgacgaaaaaatgacaaatccttttgctggttaacctgtgtactgtcctacacttaatctttaaaagattgtgaggggcatatgattaaggtgtatggcgtacccggatggggctctacaatcagtgagctgatgctaacactggctgatattccttatcagttcgttgatgtcagtggttttgaccacgagggagcttcacgcgagttattgaaaaccctgaacccgttgtgtcaggttccgacactggcattggaaaatgacgagattatgacggagacagcggcgattgcattgatggttctcgatcgtcgcccggaccttgcgccaccggttgggcgcgccgaacgtcagctgtttcaacggctattggtctggctggttgctaatgtctatccaacattcactttcgccgattaccctgagcgttgggctcctgacgcacctgaacagttaaagaagaatgttattgaatatcgaaaatcgctttatatctggttgaattcgcagctcactgctgaaccttatgcgtttggtgagcaactaacgctggtggactgttatctttgcactatgcgcacatgggggcctgggcatgaatggtttcaggataatgccacgaatatcagtgcgattgctgatgctgtatgtcagttaccgaaattacaagaagtattaaaaaggaatgaaattatttgagtgggataccagaagattatgttatttattattcagtaactttatccacaatgatgggcgtaattaattaaattcatggtatgttttttaatttatatcactctccttttcattcagcgtgtctatttcatttcctctgaaaagaaactaactattcacatcgtgcagatgtttcagttgttatcacaggcattctataatctcaaaatgtttttaatgatggatatgctcggagttggagatgcaattaatattaatacaaataaaaatatccggcaggtatgctaaaaggataaatggcgttctctgtatttattcgcaattatctgtaggacaaatatggagagcttgatgagtcagagctaaaacagcaattgattaataaacatgttgatttattcaagaaaatggatgtattttaaatgttgattcttaatataacctaatcaatagattatcaagtgagagctacacattattggaggggcaggggaaaacaccattttgggaacaatgcatcaggtactcttaccactgaagcaagatcatccggcaccaggtggtggtgcagtgctttggaaatggtcccctcgggggagttgtcattattttctatgctatttgcttattatattcatcaggtgaatttaataaattcctaatttgaaatatccactattaagctagtgtttaacgacgttaagatggcaatgtgcagatcatgttatcagggtggggcggtagcgtatattccttatacaaaccatcattcatttcaatgattgttattgaattatttattgttgtgaataaaaagacattatgaatattggtttgactttgcatatcaggttttttattactcgctgtaatgtacgagcctgtcgtgaataacgtcgagaacccatccgttgcgtttgtgattattttgttgactaaacagacacccgtttctctgaagtaaaatcccagactaaatcatcacataaccatgacatttttctgatattccccggtaacgccagatgtcgactcgcttaaccaccctcagccataccagtgaaggccaccgcgtgtcggtccactacggctatgacgataaaggccgcctgaccggcgaacgccagacggtggagaacccggagacgggggaactgctgtggcaccatgagaccggacatgcgtacaacgaacaggggctggcaaaccgcgtcacgccggacagtctgccgccggtggagtggctgacctacggcagcggctatcttgcgggcatgaagctgggcgggacgccgctgctggagttcacgcgcgaccgcctgcaccgtgagacggtgcgcagcttcggcagcatggcaggcagtaatgccgcatataaactgaccagcacatacacccccgcaggccagttacagagccagcacctgaacagcctggtgtatgaccgtgactacgggtggaatgacaacggcgacctggtgcgcatcagcggcccgcgacagacgcgggaatacggctacagcgccacgggcaggctggagagtgtgcgcaccctcgcaccagacctggacatccgcatcccgtatgccacggacccggcgggcaaccggctgccggacccggagctgcacccggacagtacactcacagtgtggccggataaccgcatcgcggaggatgcgcactatgtctaccgccacgatgaatacggcaggctgacggagaagacggaccgcatcccggcgggtgtgatacggacggacgacgagcggacccaccactaccactacgacagccagcaccgcctggtgttctacacgcggatacagcatggcgagccactggtcgagagccgctacctctacgacccgctgggacggcgaatggcaaaacgggtctggcggcgggagcgtgacctgacggggtggatgtcgctgtcgcgtaaaccggaggtgacgtggtatggctgggacggagacaggctgacgacggtgcagactgacaccacacgtatccagacggtatacgagccgggaagcttcacgccgctcatccgggtcgagacagagaacggcgagcgggaaaaagcgcagcggcgcagcctggcagagacgctccagcaggaagggagtgagaacggccacggcgtggtgttcccggctgaactggtgcggctgctggacaggctggaggaagaaatccgggcagaccgcgtgagcagtgaaagccgggcgtggcttgcgcagtgcgggctgacggtggagcaactggccagacaggtggagccggaatacacaccggcgcgaaaagttcatttttaccactgcgaccaccggggcctgccgctggcgctcatcagcgaagacggcaatacggcgtggcgcggggagtatgatgaatggggcaaccagcttaatgaggagaacccgcatcacctgcaccagccgtaccgtctgccagggcagcagcatgatgaggagtcggggctgtactataaccgtcaccggcactacgatccgttgcaggggcggtatatcaccccggacccgattgggttgagaggtggatggaatatgtatcagtatccgttgaatcccatacaagtgatagacccaatggggttagatgcgattgagaatatgacatcaggtggactaatttatgccgtatctggtgtacctggattgattgctgcaaacagcattactaacagtgcttaccagttcggttatgatatggatgctattgttggcggagctcataatggggccgccgatgcaatgagacattgttacttgatgtgtcgaatgactaagacatttggatcaacaatagctgacgtgataggtaaaaatcatgaggcggcaggggatagacaaggtcagccagctaaagaaagaatcatggatcttaaaaataacactgtcggtattgcttgtggcgatttttctgccaaatgtagcgatgcatgtattgaaaaatataacactgggcaactcttcgggttagatggtataaaagcagataatccaataaaagcaaagcaagggagttcagatgcttcaaattattagaggcaaacttgtcatttttttaattaccctttgtttatttgttgtttaccttgggtttgataacaattcaaattctgacatcgtattttatggacataaaacaccaaagagcgttgagatatatctttctgaaaaaaatattatttataaaataattaatgaccaaaaaattagtagagggaatggtcattttataagtataatggttaataattacaggacgcactgtggagtggttgatataaatcttaattttttcaatgatattctttatagcgtgcgattaaaaaacattagtaaactggagaatatggagttctgcgctacaaaacaacgggtgtattttagtgataaaaacaagaaggctagttataaaataattaattatggagactattatgatgttgattattatgataacaatttgaaaaatgaagtttttgactggattggtaaatggtcataatgaacaacaccagaaagagaaaaatataaaatacatacagaaagacatgagagcaagggacggggcagggcaagatcatgaaaattgtgatgtaaatcacgattttcatctttgctttaacgcctacaggtgatcaaaatttaacctttggaataactaaaaagataaaaaaggacgccaggtgagtattcaaagtttgcttgattatatttcagtgacccctgatatacgacaacaaggaaaggttaaacataaattatctgctattttgtttctcaccgtatgtgcagtaattgcaggtgccgatgagtggcaggaaattgaagattttggacatgaaagacttgaatggctaaagaaatatggtgattttgataatggcattccggtcgatgacaccattgcacgcgttgtgagtaacattgacagtttggcctttgaaaagatgtttattgaatggatgcaggagtgccatgaaatcactgatggtgaaattatagcaatagatggaaagaccataagaggctcctttgataagggaaaaagaaaaggagcaatccatatggtgagtgcattctcgaacgaaaatggtgttgtactggggcaggtgaaaacggaagccaaaagtaatgagattacagccattccagagttgcttaacctactgtatttaaagaaaaatttgataaccattgatgctatgggctgtcagaaagatatcgcttcgaagatcaaagataaaaaagcagattatcttctggcagtaaaaggcaatcaggggaaattacatcatgcattcgaggaaaaatttcctgtaaatgtgttttctaattataaaggcgattcgtttagtacgcaggagataagtcatggaagaaaagaaacacgtttgcatattgtcagtaacgtaacgcctgaacttttgtgattttgaattcgaatggaagggattaaaaaagctttgtgtagcattgtcattcaggcagaagaaagaagataaatcagcagaaggtgtaagcatccgatattatatttcatcaaaggatatggatgctaaagaatttgcacatgctatcagagcgcactggctgatcgagcacagtcttcattgggtgttagatgtaaaaatgaatgaagatgccagccggataagaagaggaaacgcagcctaaataatatctggaataaagaagatggcactgaatttattaagagattgcaaagacattaagggtgaagaggaaaagaaagaaggctgcgttaaacacagggaaagatcatcagaagttcactttttgtactaaacaattcgcattttatgtttaaaaattgagatattccttattacctaaagctgttttttattgcttacacatgatcaaatactccttacataattaaggagaacaaaatggaacttaaaaaattgatgggacatatttctattatccccgattacagacaagcctggaaaatggaacataagttatcggatattctactgttgactatttgtgccgttatttctggtgcagaaggctgggaagatatagaggattttggggaaacacatcccgattttttgaagcaatatggtgattttgaaaatggtattcctgttcacgacaccattgccagagttgtatcctgtatcagtcctgcaaaatttcacgagtgctttattaactggatgcgtgactgccattcttcagatgataaagacgtcattgcaattgatggaaaaacgctccggcattcttatgataagagtcgccgcaggggagcgattcatgtcattagtgcgttctcaacaatgcacagtctggtcatcggacagatcaagacggatgagaaatctaatgagattacagctatcccagaacttcttaacatgctggatattaaaggaaaaatcatcacaactgatgcgatgggttgccagaaagatattgcagagaagatacaaaaacagggaggtgattatttattcgcggtaaaaggaaaccaggggcggctaaataaagcctttgaggaaaaatttccgctgaaagaattaaataatccagcgcatgacagttacgcaatgagtgaaaagagtcacggcagagaagaaatccgtcttcatattgtttgcgatgtccctgatgaacttattgatttcacgtttgaatggaaagggctgaagaaattatgcgtggcagtctcctttcggtccataatagcagaacaaaagaaagagctcgaaatgacggtcagatattatatcagttctgctgatttaaccgcagagaagttcgccacagcaatccgaaaccactggcatgtggagaataagctgcactggcgtctggacgtggtaatgaatgaagacgactgcaaaataagaagaggaaatgcagcagaattattttcagggatacggcacattgctattaatattttgacgaatgataaggtattcaaggcagggttaagacgtaagatgcgaaaagcagccatggacagaaactacctggcgtcagtccttacggggagcgggctttcgtaatcttgccctgggcattattgtcgtataaacgctttaccggacacatgacattcacaatgtgtgttaattttactgacatctttcaaaaggagcgtaatcatgccgcacatcgacattaaatgttttccgcgtgaactggacgaacaacaaaaagcagcacttgctgcagatattaccgacgttattattcgtcatctgaacagtaaagacagttcgataagcattgctctacagcagattcaaccagaatcttggcaagctatctgggatgccgaaatcgcgccccaaatggaggctttgataaagaaacctggttatagcatgaatgcttaacccgccgtaacacgcttgccgctggtaacaaacgtcccagcacctaaatgatgcaacgtattgagcttatcatcatcaaactgccagcggccttcgacaaatacccgtgcgtctgccgctgctgatactacttcgccaaacagcgtgtcgtattcttcttgcgcagaagtcgcaggtagcaatcgacactccatccacgccagacatttttcctcgaccagaggcaaaccaaataccgggcctctcacaaccggaatgccatagcaattaaatttatcttcatcacgccccgacacacttcccaccgcccacgtccagttagttgctgcaacgcccgggataacgatgccaaatttaccgttatgttcaatcaactccctggtccatgtcgatttatctaccacaatcgccacgcgtggaggttcaaactccaccggcattgaccaggctgcagccataatgttacgccgctgggattgctcatcgaaactggtgatcaagaccgttgggccatgatttaacagacggctggcatggtgtaattctatggggatgaatcggctcatggtatcgcctcgcgaagaaggtttttttaagcgtagtccgtaacgcaataagtaacgaaattaacgggattggcgatttgcgaacgtgatgcatgtccgcgatcgcacaaaatagccggtgcggcgtctattccaggttataagttgagaaaaccactaagggaaacgcctgatgacgcccattctgaatcactattttgcccgtattaactggtcgggagctgctgcggtcaatattgatacgcttcgtgcattgcacctgaaacacaattgcaccattccgtttgaaaacctcgacgttttgctgccgagggaaatacagcttgataatcaatcgccggaagagaaactggtgatagcccgtcgtggcggttactgttttgagcagaatggcgtgtttgagcgggtgttacgcgagctggggtttaacgttcgcagcttgttagggcgcgtagtgttatcaaatccgccagcattaccgccgcgcacccatcgtttgctgttggtggaactggaagaggaaaaatggattgctgatgtcggtttcggtgggcagacgctaaccgcgccgattcgtttagtttccgatctcgtgcagaccacgccacacggagagtatcggttgttgcaggagggtgatgattgggtgttgcagtttaatcatcatcagcattggcagtcgatgtaccgttttgatctctgcgagcagcaacaaagcgattatgtgatgggcaatttctggtcggcgcactggccgcagtcgcattttcgccatcatttgctgatgtgccgccatttgccggacggcggcaagctgacactgaccaattttcattttacccattatgaaaatgggcacgcggtggagcagcgaaatctaccggatgtggcgtcattatatgctgtgatgcaagaacagtttggtctgggcgtggatgatgcgaaacatggctttaccgtggatgagttagcgctggtgatggcggcgtttgatacgcacccggaggcgggaaaataatttatgtcaggttgccggatgcggcgtaaacgccttatccggcatacattagcccggttgtagacctgacaggcgaagcgcatcagacaacggtttcagagttcaattgcccattcggcatgaaacaaaatcaccgctgtgcctgaaatggtgactttttccggttggttatcacgaattgtcaccgtcacttcaatcataccgtcacgccccaatgcgcgcccctgatggcctttaacacgcaacacgttgccatcgtggggcaatacgttgtgatgtaccaaccatgcacccatcgggccattggcattgccagtcaccggatcttccacaataccaatcgcaggcgagaacatgcgaccatcggtttcgtttttgcctgggcggatctggaacgggaagaaaccattgcagccaatctttttgctgatagcggtcagcgcattaaggtcaggcgaaagggcgtcgatatccacttccggtttcagtgggatcatcacttttgagtgtcctgttgttgccacctgaattggcaagcctggcagaatatcgtcctcagtgagatgaagcgcgttgataatcgccgcacgtgtttcaccttccagcggtggctcaaagcccggcgtaccttgttccagcgaaatacgataatcatcgttgtgcttttcgatagtcacgcgatgttttcctgccagcgatgtttgccagatcgtgcaatttcctaaacctaacaccttcgcacgtacatagtgcgcagctactgtcgcgtgaccgcaaatcggcacttcaaccgttggcgtaaagtagcggatgcgcacatcgctgtcgtcgctgtgcagcagaaaagcagtttccgaatggcctaactcgcgggcgataagctgcatttgcgcttcgctaagattatcggcggggaaaacaacaccggcagaattgccgcgaaacggttgtgaggtaaaagcatcgacgtggtacacctgcggtttcattaacgttctcctgtgactggagaactatcatagcctgcaagtggccggagagcgaagggctatccggccagggtgaaattatcgccgcgaacgcacaatttgatatcgacgagtaaagtactcaaacggcgcgctccacacatgcaccagtcgggtgaacgggaagagcaggaagatggtcattcccaacaccagatgcaggcggaagacgaacgctacgccgttgagcatctctgacgatccaccacggaaagtgacaatgctttgcgcccaacccaccagcttcatcatttcgctaccatcaggatactgtgctgaaaacggtatggtacttagccccaacagacactggatcagcaaaatgctcatgatgatgatatccggcgtagtggaagtggcacgcacgcgctgatttgtcagcctgcgccacagcagtcctgcgccgccaatcaacgtcaacacaccgcaaataccgccgagcaccatcgccatgagttgtttcgctgccactggcaaaaaccacgcgtacatccagtgcggcgttaacatgccgaacaagtgcccgaagaaaatccccaaaatgccgatatggaacagattcgaccatatcaccatcccgcgtttatcgagcatttgacttgaggaggcgcgccaggtgtactgcccgtagtcgtagcgcagccagctgccgaggaaaaacaccgtcgcacaaatgtacgggtagatatcgtaaaaaaagacgttcagatactgaatcatttcccacctcccgcactgatgtcgacatattgcggcgcgacatcctggctaaagcgtcgctgatattgattaagcggcgagctgtcacacgccgtggcgttatcttcaataaacttcacctgttcctcttcccacactgcatcaagcgcctggcgggtgtcatcgcgctcttcgctgtttacttgttttgtgacactgtcacttgaaagggagcttcccgccagttgcagcagagcatcaaacaacgcgtaccacggtgcctcgcgttgttttaagcgaccgccaagcagggcgaggatcggcgcaacattgagcaatccttctttcgcctgatcgtcaggcagtacgcttaaatactccagatacagcggtagataatcgggcagttcccgacaatccagctgcaggccgaccttttcatactccgccagcaggtccaccattgcctggccgcgatcgcgggactcggcatgaacatgttcgaacagcagcagcgacgtggtgcgcccgcggtcaaacacttcgcaccattcggcctgtttatccagcagcggcgcgttaagcaggttgtgggtgaaatccgtaagcatcggcgcgtcgcggcggatcaacgccagcgcgtcctccttgcattcccacaacagctcgtccggatactccatcaacaggccgatcactttgaggatctgcattattcgccctccgctttgtcgcgcacttcggtgatgttgatggcatcgatacggctactgttgaacaggttgaatttactgtccgaaccgtggcaaccgtcgccaaaggtaaaaccgcagccgttgcgttctgcgaaggcatcgcccgccatttcccgatggctggtcgggataacaaaacgatcttcatagttggcaatggcgagatagcgatacatctcttcgacctgggcgacgctcaggcctacttcgtcgatggcacgagtatcagtaacgccttccacggtttgtgaacgcatatagtggcgcatcgccatcatccgtttcagcgcccgcagtaccggaccggtatcgccggcactcaacatattggcgagatattgcaccggaatacgcaggctttcgatggcgggcagcacgccttcgcttttcggcaaaccgcccgcatctgcgtaggactgaatcggtgacagcggaggaacgtaccagaccatcggcagggtgcggtattcagggtgcaacggtagtgccagtttccagtccatcgccattttgtagactggcgaacgctgggcagcgtcaatcacattttgtggaataccttgtttcagggcttcctcgatcactgagggatcgtgtggatcgaggaacacttcgcactggcgttcatagaggtcaacttcgcgctcggtgctcgccgcttcctcgatgcggtcggcgtcgtaaagcagcacgcccagataccggatgcgacccacgcaggtttctgagcacacggtcggttgaccggactcaattcgtgggtaacagaagatgcatttttctgacttgccgcttttccagttgaagtagatttttttgtacggacaaccgcttatgcacaaacgccagccacggcatttatcctgatcaatcagcacaatgccgtcttcttcgcgtttgtagatagcgccgcttgggcaggtcgccacgcagctgggattgaggcagtgttcgcacaggcgcggcaggtacatcatgaaggtgttttcaaactgcccgtacatctccttttgcatggcctcgaagttgcggtcgcgggcacgtttttcgaactcaccgcccagcagttcttcccagtttggcccccagatcactttgtccatccgtttgccgtcaatcagtgaacgcgggcgagcagtaggaatatgtttgccttccggtgcgctatgcaaatgttcgtagtcgaaggtgaaaggttcgtagtaatcatcaatctgcggcaccaccgggttggcgaagattttggttattacgcccatcttgttgcccagacgcgggcgtatcttgccattcacatcacgcacccagccgccttgccactcttcctgatcttcccagtttttcggataaccaatgcccggtttggtttcgacgttgttaaaccatgcgtactccatgccttcgcgcccggtccagacgtttttacaggtcaccgaacaggtatggcagccgatacatttgtcgaggttaagcaccatgccgacttgtgaacggattttcattttttcgcctcctgtacctgatcgcgaccttcatcatccagccagttaacgttcttcatcttgcggatcatgatgaactcatcgcggttcgatccgacggtgccgtagtagttaaagccccaggccagctgcgcgtaaccgccaatcatatgcgttggtttcgggcaaacgcgggtaaccgagttatgaatgccgccgcgcatgccagttacttccgaaccaggaatattcataatgcgttcctgggcgtgatacatcatggtcatgcccggcggtacacgttggctgaccaccgcgcgggcagtcagcgcgccgttggcgttgaatacttccacccagtcgttatcgacaatggtcagttctcgggcatctgtttcgctgatccagacaatcggtccaccgcgagagagcgtcagcattagcaggttttcactgtaggttgagtgaatgccccatttctggtgcggcgtcaggaagttaagtgctttttccgggaagccgtttggcggtatctggcgcatctcactgacgctacgggtgtcgataggcgggcgataagccaccaggctttcaccaaaagcacgcatccacggatgatcctgatagagctgctggcgtcccgacagcgtgcgccacggaattaactcatgaacgttggtgtatcccgcgttataggagacgtgatcgctttccagaccggaccaggtggggctggagataattttacgcggctgcgcctgaatatcgcgaaagcgaatcttctcgtcctctttgtgcagcgccagatgggtatgttcgcgcccggtgatctcgcccagcgcctgccacgctttgactgcaacatgaccgttggtttccggtgccagtgccagaatcacttctgaagcgtcaatggcggtgtcaatcagcggacgcccctgtgccgggccatcacgcttggtgtaattgagtttgccgaggaaatcgatttcatcctgggtattccacgaaatccctttaccgccattgccaagtttgtccatcaatggcccgagcgaggtaaagcgttcatacgtagcagggtagtcgcgctccaccgccacaatattcggcgcggttttgcctggaatcagatcgcattcgcctttgcgccagtcgagcacttcacacggctgtgagagctctgccggagagtcatgcagtaggggttgtaataccacgtcggtttctttgccaagatgacccacgcacacttgcgaaaatgctttggcgatacctttgtagatttcccagtcgctgcgtgattcccacgccggatcgaccgccgcagaaagcggatgaataaacggatgcatatccgaggtgttcatatcgtctttttcgtaccaggtggcggtgggcagaacgatatcggagaacaggcaggtactggacatgcggaagtcgagcgtcaccagcaggtcgagcttgccttcaatcgctgcagtttgccactcgacttcttccggtttgatcccgtcgctggcaccgagttcctcgccctgaatcccgctttcggtccccagcagatacttctgcatatactcgtggcctttgccggaggagccaagcaggttagagcgccagacaaacaaattacgcggatgattgctgctgctatctggttgttcgcaggccatacgtaaatcgcccgatttcagcgcctgggcggtaaattctgtgggggataatccggccttgtcggcttcagctttaatcccgagcgggttacgccccagctgcggcgcagaaggtagccagcccatacgttcggcgcgaacgttgaaatcaatcagatgaccgctgtacttactggcatcggcgagcggtgaaagtaactcctgagcagagactttttcatagcgccattggctggaatgattgtagaaaaacgaggtgctgttcatttggcgcggtggtcggttccagtcgagcgcaaaggccagtggcaaccagccggtttgtgggcgcagtttttcctggccgacatagtgtgcccagccgccaccgctttgcccgacacaaccgcagaagatcagcatattgatcatcccgcggtagttcatgtccatgtgataccagtggttaacacctgcgccgaggataatcatcgagcgcccatgcgttttatgggcggtatcggcaaattcacgggcgatggtttcaatatactggcgcggcacgccggtaatttgctcaccccaggctggggtgtacggtttgatttcagcgtaatctttcgcactgttttcatcttccagcccgcgatcgaggccgtaattcgccagtaccaaatcataaacgctgaccaccggacaggtgttgccatcgactaacgtcaggtttttaacgggcaattggcgcaccagcaccggattgtgttttacgctgcgaaaatgcggattttcaatgccgccaaagtaggggaaggccacgcctgcaacagcgtcatgttgaccgagcagggttaacgacaattcggtttccgtaccggcggcaatggattccagattccatttgcctttttctccccagcggaaaccaatcgaaccgttcggcactaccaattcacctgcggtattaactgctacggttttccactgcggattgttgctttcgcccagtccatccaccaggtcagatgcgcggatcatgcgcccgggaacgtagctaccatcgtcgcgaggctccagcattaccagcatcggcatgtcgctgtagcggcggcagtagttgataaagtagtcgctgggattatcgagatgaaactcttttaaaatcacatggcccattgccatcgccagggcgctatcagtgccttgtttcggtgccagccactggtcgcacaatttggccacttcagagtagtcaggggtaatggcgatggttttagtgcctttgtagcgtacttcggtaaagaagtgggcgtccggcgtacgtgtctgcggtacgttagacccccaggcgatgatgtagctggagttataccagtcggcagattccggtacgtcggtttgctcgccccaggtcatcggcgaggcgggcggcaggtcgcaataccagtcgtagaaacttaaacaggtgccgccaagcagcgacagataacgcgttccggcggcgtaagaaaccatcgacatcgccgggatcggcgagaaaccggcaacgcgatccgggccgtaggttttgatggtccagacgttagcggcggcaatcagctggtttagttcctgccagttggagcggataaacccgccgcgcccacgcacttgtttgtagctcaggcacttttgcggatcgttcataatcgatgcccacgccagtaccggatcgctgtgttgcttgagggcttcgcgccacagttcaatcagtcgtttacgaatgagcgggtatttcaggcggttagcgctgtaaagataccaggagtaacttgcgccacgcgggcagccgcgaggttcatgattgggcaggtcagggcgagtgcgcgggtagtcggtctgttggatttcccaggtcaccagaccatttttaacgtagattttccagctacaggagcctgtacagttaacaccgtgggtggaacgcacgattttgtcgaactgccaacgctggcgatagctgtcctcccagtcgcggttgctatgcatcacctgtccgtgaccatcggcaaaggtttcgcccttttgtttgaagtagcgaaagcgatccaaaagtttactcatgacatgactcctgctccaggaatgaattgggatctgatgccttgtcggatgcgacacggttgtacatcaggcatcgatctcttatttttggctgaacttccgccgaccataaaccagccaggtcagcagcacacaaacgatgtagaagattaaaaacactttcatcgcgccgaccggagagccggtcatattgagcgacatgccaaacgcctgcggaataaaaaagccgcccactgcgccaatggctgagataaagcccagagccgccgccgtttcggtgacggcttctttatgagcttgctcatcactaccgcctttcatctttacccgataaatggttatctggcgaaagatgacggcgatcatctggaaagtagaaccacttcccagacccgcagtcagaaacagccccataaatacggcgtaaaaggcgatgaaattaccggagcctgtgcccggtaaggtaaggaacagcagggcactgaaaatcgccataaaaataaagttgatcaacgtcacccgcacgccgccgaacttatcggaaatagcaccaccaaccgaccgcgcgatggcaccgataaatgggccaaagaacgccaggcgcagaatattcacatccgggaactgggtttttgccagcatggcaaaacccgcagaaaaaccgataaacgaaccgaaggtggcaaggtaaagcaggctcagcagccagagatgcaggcgttgtaagacagggagctggtcggcaattgaggcgcgtgaactggcgatatcattcatccctgaccatgcggcgatcgtggcaatcgccagtagcggtacccaaatccatgcggcattcgccagcgacatcaccgaaccgtcggcctgcggtacgccattgacgccgagaaaggcaaatacaggtacaaaaatgaccagcggtgcaaccagctgcattacacttacacctaagtttcctaatccgccattaatcccaagagcgctcccttgtttggcttttggaaagaagaaactgatattgcccatgctcgaagcaaagtttgcacctgcaaaaccgcatagcaaagcgataacgataaatatcccaaaaggagtattcggattttgcacggcaattccgagccagacgcaaggaataatcaggattgcagtactaaaaaccgtccatcggcgtccaccgaatataggcaccataaaggagtagggaacacgcaataatgcgccagaaacggagggtaatgcggttaataaaaagagttgatcggtagtaaaattaaaaccgattttattgagattaacggtaactgcgctaaatagcatccagacacagaaggcaagaagtagacaactgactgatatccagagatttcttcgagcaatatgttttcctttattttcccagaaggccggattttctggtttccagtcgcgcaaaagataacgactatttttctcattttgcagtgccatattgttcctcacatgcacacattggtaatgaaaaaaagacaaaacacgaggtaaggcgcaatagccagttattagaattaaggatgaattgggtgaagtgctgattgaaagaatagataagaaagcgtaaccgcgggggcagaatggggattaagtagccagatatgtgttactaaatgtaactaacaagctaaccttcaaacggggttaatctttgaacgtatgtcatgtttcaacccttcagatcgtgaatctaaagggttacatattaactatattatcaacaagaccagacacttatagaattagtgatgatttattcactaaaaaggccatgaactggaggaaaacgatctgtccagaaggtctatcggttcctctcttattgcctgattgtaataatcgttattacagtaagtattgtttatttcatctaaggtcatgtttttaacttttatattcatctggtttacaacttcctctgtcttgtaagtgtgtatattatatggg

(The sequence listing continues in the following parts.)
